(19) United States
(12) Patent Application Publication
(10) Pub. No.: US 2025/0186589 A1
(43) Pub. Date: Jun. 12, 2025

(54) MODIFIED ALLOGENEIC CELLS AND METHODS AND COMPOSITIONS FOR THE PREPARATION THEREOF

(71) Applicant: Beam Therapeutics Inc., Cambridge, MA (US)

(72) Inventor: Colby Maldini, Cambridge, MA (US)

(73) Assignee: Beam Therapeutics Inc., Cambridge, MA (US)

(21) Appl. No.: 19/062,951

(22) Filed: Feb. 25, 2025

Related U.S. Application Data
(63) Continuation of application No. PCT/US2023/072911, filed on Aug. 25, 2023.
(60) Provisional application No. 63/373,644, filed on Aug. 26, 2022.

(51) Int. Cl. A61K 40/50; A61K 40/11; A61K 40/22; A61K 40/41; C07K 14/74

(52) U.S. Cl. CPC A61K 40/50; A61K 40/11; A61K 40/22; A61K 40/418; C07K 14/70539; C07K 2319/00

(57) ABSTRACT

The present disclosure features allogeneic modified cells (e.g., T- or NK-cells) having increased persistence, increased resistance to immune rejection, or decreased risk of eliciting a host-versus-graft reaction, or a combination thereof. Methods for producing and using the same are also provided.

### CROSS REFERENCE TO RELATED APPLICATIONS

[0001] This application is a continuation under 35 U.S.C. § 111 (a) of PCT International Patent Application No. PCT/US2023/072911, filed Aug. 25, 2023, designating the United States and published in English, which claims priority to and the benefit of U.S. Provisional Application No. 63/373,644, filed Aug. 26, 2022, the entire contents of each of which are incorporated by reference herein.

### SEQUENCE LISTING

[0002] This application contains a Sequence Listing which has been submitted electronically in XML format and is hereby incorporated by reference in its entirety. The Sequence Listing XML file, created on Aug. 7, 2023, is named 180802-046502PCT_SL.xml and is 1,154,284 bytes in size.

### BACKGROUND

[0003] Autologous and allogeneic immunotherapies are treatment approaches in which cells are administered to a subject. Autologous and allogeneic immunotherapies can be used to treat any of a variety of diseases including autoimmune diseases, graft-versus host disease (GVHD), and the like. For example, some diseases can be treated by administering to a subject in need thereof autologous or allogeneic immune effector cells capable of targeting and killing or inhibiting activity of disease-associated cells (e.g., neoplasia cells or autoantibody-producing cells) in a subject. Allogeneic cells (e.g., cells that are not recognized by a host's immune system as other) may also be useful for organ and tissue replacement and repair.

[0004] In some instances, autologous or allogeneic immunotherapies can be used to treat a disease (e.g., a cancer or autoimmune disease) by administering to a subject an immune effector cell modified to express a chimeric antigen receptor. To generate an immune cell that expresses a chimeric antigen receptor (CAR), the immune cell is first collected from the subject (autologous) or a donor separate from the subject receiving treatment (allogeneic) and genetically modified to express the chimeric antigen receptor. The resulting cell expresses the chimeric antigen receptor on its cell surface (e.g., CAR-T cell), and upon administration to the subject, the chimeric antigen receptor binds to a marker expressed by the neoplastic cell. This interaction with the marker activates the CAR-T cell, which then kills the neoplastic cell.

[0005] Autologous cell therapies face numerous challenges, including obtaining suitable biological materials from the patient, the expense of carrying out patient-specific therapies, and long manufacturing times. Allogeneic cell therapy is also subject to certain challenges, such as graft-versus-host disease (GVHD) and host rejection of CAR-T cells provide additional challenges. Currently, allogeneic T cells are susceptible to lysis by immune effector cells (e.g., alloreactive T cells or natural killer cells) in patients.

[0006] Thus, there is a significant need for techniques to reduce susceptibility of allogeneic immune effector cells and other modified immune cells to lysis by immune effector cells of an allogeneic subject (e.g., alloreactive T cells or natural killer cells).

### SUMMARY

[0007] The present disclosure features allogeneic modified cells (e.g., T- or NK-cells) having increased persistence, increased resistance to immune rejection, or decreased risk of eliciting a host-versus-graft reaction, or a combination thereof. Methods and compositions for producing and using the same are also provided. In embodiments, the methods for preparing the modified cells leverage base editing. Among other things, the present disclosure shows that allogeneic cells can be modified to be resistant to immune rejection. The present disclosure also features allogeneic modified immune cells (e.g., T- or NK-cells) having increased persistence, increased resistance to immune rejection, and/or decreased risk of eliciting a host-versus-graft reaction, and methods of producing and using such cells, for example, in the treatment of neoplasias without the disadvantages of autologous cell therapies such as long manufacturing times, or the need for an adequate supply of sufficiently healthy autologous donor cells.

[0008] In one aspect, the disclosure features a fusion polypeptide containing an HLA heavy chain polypeptide, or a functional fragment thereof, and a beta-2-microglobulin (B2M) polypeptide, or a functional fragment thereof.

[0009] In another aspect, the disclosure features a fusion polypeptide containing an amino acid sequence with at least 85% sequence identity to a polypeptide sequence listed in Table 8A.

[0010] In another aspect, the disclosure features a polynucleotide encoding the fusion polypeptide of any of any aspect of the disclosure delineated herein, or embodiments thereof.

[0011] In another aspect, the disclosure features a vector containing a polynucleotide encoding the fusion polypeptide of any aspect of the disclosure delineated herein, or embodiments thereof.

[0012] In another aspect, the disclosure features a cell containing the fusion polypeptide of any aspect of the disclosure delineated herein, or embodiments thereof.

[0013] In another aspect, the disclosure features a pharmaceutical composition containing the polynucleotide of any aspect of the disclosure delineated herein, or embodiments thereof, and a pharmaceutically acceptable excipient.

[0014] In another aspect, the disclosure features a method for preparing a modified cell. The method involves a) modifying a cell to knock-out expression of an endogenous beta-2-microglobulin (B2M) polypeptide in the cell. The method further involves b) contacting the cell with a polynucleotide encoding a fusion polypeptide containing an HLA heavy chain polypeptide, or a functional fragment thereof, and a beta-2-microglobulin (B2M) polypeptide, or a functional fragment thereof, and expressing the polypeptide in the cell.

[0015] In another aspect, the disclosure features a method for preparing a modified cell. The method involves a) modifying a cell to knock-out expression of an endogenous beta-2-microglobulin (B2M) polypeptide in the cell. The method further involves and b) contacting the cell with a polynucleotide encoding a B2M polypeptide and expressing the B2M polypeptide in the cell. Expression of the B2M polypeptide is reduced relative to an unmodified cell, and/or the B2M polypeptide contains an alteration at one or more amino acids positions that effects a reduction in binding of the B2M polypeptide to an HLA heavy chain polypeptide

[0016] In another aspect, the disclosure features a modified cell prepared according to the method of any aspect of the disclosure delineated herein, or embodiments thereof.

[0017] In another aspect, the disclosure features a pharmaceutical composition containing the modified cell of any aspect of the disclosure delineated herein, or embodiments thereof, and a pharmaceutically acceptable excipient.

[0018] In another aspect, the disclosure features a method for killing a neoplastic cell. The method involves contacting the neoplastic cell with the cell or the pharmaceutical composition of any aspect of the disclosure delineated herein, or embodiments thereof.

[0019] In another aspect, the disclosure features a method for treating a subject having a neoplasia. The method involves administering to the subject the cell or the pharmaceutical composition of any aspect of the disclosure delineated herein, or embodiments thereof.

[0020] In another aspect, the disclosure features a kit for use in the method of any aspect of the disclosure delineated herein, or embodiments thereof, where the kit contains the fusion polypeptide, polynucleotide, vector, pharmaceutical composition, and/or cell of any aspect of the disclosure delineated herein, or embodiments thereof.

[0021] In any aspect of the disclosure delineated herein, or embodiments thereof, the HLA heavy chain polypeptide and/or the B2M polypeptide contains an amino acid alteration that reduces affinity of binding to a CD8 polypeptide relative to a wild-type HLA heavy chain polypeptide and/or B2M polypeptide.

[0022] In any aspect of the disclosure delineated herein, or embodiments thereof, the HLA heavy chain polypeptide is an HLA-A, HLA-B, HLA-C, or HLA-E polypeptide. In any aspect of the disclosure delineated herein, or embodiments thereof, the HLA heavy chain polypeptide contains one or more amino acid alterations to one or more of amino acid positions 183-274. In any aspect of the disclosure delineated herein, or embodiments thereof, the HLA heavy chain polypeptide contains one or more amino acid alterations at an amino acid position selected from one or more of A73, D227, T228, and A245. In any aspect of the disclosure delineated herein, or embodiments thereof, the HLA heavy chain polypeptide contains one or more amino acid alterations selected from one or more of A73T, D227K, T228A, and A245V. In any aspect of the disclosure delineated herein, or embodiments thereof, the HLA heavy chain polypeptide contains the alterations D227K and T228A, or the alterations D227K, T228A, and A245V.

[0023] In any aspect of the disclosure delineated herein, or embodiments thereof, the B2M polypeptide contains an amino acid alteration. In any aspect of the disclosure delineated herein, or embodiments thereof, the B2M polypeptide contains an amino acid alteration at position K58. In any aspect of the disclosure delineated herein, or embodiments thereof, the B2M polypeptide contains the amino acid alteration K58E.

[0024] In any aspect of the disclosure delineated herein, or embodiments thereof, the fusion polypeptide further contains a cognate peptide (cPep). In embodiments, the cPep contains from about 8 to about 10 amino acids. In embodiments, the cPep contains 9 amino acids. In embodiments, the cPep contains an amino acid sequence selected from one or more of QYDDAVYKL (SEQ ID NO: 520), RYRPGTVAL (SEQ ID NO: 521), LSSPVTKSF (SEQ ID NO: 522), EEVHDLERKY (SEQ ID NO: 523), RLRAEAQVK (SEQ ID NO: 524), IIDKSGAAV (SEQ ID NO: 529; IV9 (AA)), IIDKSGEEV (SEQ ID NO: 530; IV9 (EE)), TIDKSGLAV (SEQ ID NO: 531; IV9 (LA)), IIDKSGSTV (SEQ ID NO: 532; IV9 (WT)), and the cPep sequences listed in Table A. In some embodiments, the inclusion of the cPep in the fusion protein causes trimerization of the fusion protein when expressed on the surface of a cell (e.g., modified immune cell).

[0025] In any aspect of the disclosure delineated herein, or embodiments thereof, the fusion polypeptide contains one or more linkers. In embodiments, the one or more linkers contain the amino acid sequence (GGGGS)ₙ (SEQ ID NO: 247). In embodiments, n is 3 or 4.

In any aspect of the disclosure delineated herein, or embodiments thereof, the fusion polypeptide further contains a signal peptide. In embodiments, the signal peptide is a B2M signal peptide. In embodiments, the signal peptide contains the amino acid sequence MSRSVALAVLALLSLSGLEA (SEQ ID NO: 525).

[0026] In any aspect of the disclosure delineated herein, or embodiments thereof, the fusion polypeptide further contains a transmembrane domain. In embodiments, the transmembrane domain is a cluster of differentiation 4 (CD4) transmembrane (CD4TM) domain. In embodiments, the CD4TM domain contains an amino acid sequence with at least about 85% sequence identity to the amino acid sequence MALIVLGGVAGLLLFIGLGIFFCVRC (SEQ ID NO: 437).

[0027] In any aspect of the disclosure delineated herein, or embodiments thereof, the HLA heavy chain polypeptide contains a sequence with at least 85% sequence identity to an amino acid sequence selected from one or more of:

HLA-A*02 (HLA-A2)
(SEQ ID NO: 441)
GSHSMRYFFTSVSRPGRGEPRFIAVGYVDDTQFVRFDSDAASQRM
EPRAPWIEQEGPEYWDGETRKVKAHSQTHRVDLGTLRGYYNQSEA
GSHTVQRMYGCDVGSDWRFLRGYHQYAYDGKDYIALKEDLRSWTA
ADMAAQTTKHKWEAAHVAEQLRAYLEGTCVEWLRRYLENGKETLQ
RTDAPKTHMTHHAVSDHEATLRCWALSFYPAEITLTWQRDGEDQT
QDTELVETRPAGDGTFQKWAAVVVPSGQEQRYTCHVQHEGLPKPL
TLRWEPSSQPTIPIVGIIAGLVLFGAVITGAVVAAVMWRRKSSDR
KGGSYSQAASSDSAQGSDVSLTACKV;
HLA-A*03
(SEQ ID NO: 442)
GSHSMRYFFTSVSRPGRGEPRFIAVGYVDDTQFVRFDSDAASQRM
EPRAPWIEQEGPEYWDQETRNVKAQSQTDRVDLGTLRGYYNQSEA
GSHTIQIMYGCDVGSDGRFLRGYRQDAYDGKDYIALNEDLRSWTA
ADMAAQITKRKWEAAHEAEQLRAYLDGTCVEWLRRYLENGKETLQ
RTDPPKTHMTHHPISDHEATLRCWALGFYPAEITLTWQRDGEDQT
QDTELVETRPAGDGTFQKWAAVVVPSGEEQRYTCHVQHEGLPKPL
TLRWELSSQPTIPIVGIIAGLVLLGAVITGAVVAAVMWRRKSSDR
KGGSYTQAASSDSAQGSDVSLTACKV;
HLA-B*57
(SEQ ID NO: 445)
GSHSMRYFYTAMSRPGRGEPRFIAVGYVDDTQFVRFDSDAASPRM
APRAPWIEQEGPEYWDGETRNMKASAQTYRENLRIALRYYNQSEA
GSHIIQVMYGCDVGPDGRLLRGHDQSAYDGKDYIALNEDLSSWTA
ADTAAQITQRKWEAARVAEQLRAYLEGLCVEWLRRYLENGKETLQ
RADPPKTHVTHHPISDHEATLRCWALGFYPAEITLTWQRDGEDQT
QDTELVETRPAGDRTFQKWAAVVVPSGEEQRYTCHVQHEGLPKPL
TLRWEPSSQSTVPIVGIVAGLAVLAVVVIGAVVAAVMCRRKSSGG
KGGSYSQAACSDSAQGSDVSLTA;
HLA-B*44
(SEQ ID NO: 446)
GSHSMRYFYTAMSRPGRGEPRFITVGYVDDTLFVRFDSDATSPRK
EPRAPWIEQEGPEYWDRETQISKTNTQTYRENLRTALRYYNQSEA
GSHIIQRMYGCDVGPDGRLLRGYDQDAYDGKDYIALNEDLSSWTA
ADTAAQITQRKWEAARVAEQDRAYLEGLCVESLRRYLENGKETLQ
RADPPKTHVTHHPISDHEVTLRCWALGFYPAEITLTWQRDGEDQT
QDTELVETRPAGDRTFQKWAAVVVPSGEEQRYTCHVQHEGLPKPL
TLRWEPSSQSTVPIVGIVAGLAVLAVVVIGAVVAAVMCRRKSSGG
KGGSYSQAACSDSAQGSDVSLTA;
HLA-C*04
(SEQ ID NO: 449)
GSHSMRYFSTSVSWPGRGEPRFIAVGYVDDTQFVRFDSDAASPRG
EPREPWVEQEGPEYWDRETQKYKRQAQADRVNLRKLRGYYNQSED
GSHTLQRMFGCDLGPDGRLLRGYNQFAYDGKDYIALNEDLRSWTA
ADTAAQITQRKWEAAREAEQRRAYLEGTCVEWLRRYLENGKETLQ
RAEHPKTHVTHHPVSDHEATLRCWALGFYPAEITLTWQWDGEDQT
QDTELVETRPAGDGTFQKWAAVVVPSGEEQRYTCHVQHEGLPEPL
TLRWKPSSQPTIPIVGIVAGLAVLAVLAVLGAMVAVVMCRRKSSG
GKGGSCSQAASSNSAQGSDESLIACKA;
HLA-C*05
(SEQ ID NO: 450)
CSHSMRYFYTAVSRPGRGEPRFIAVGYVDDTQFVQFDSDAASPRG
EPRAPWVEQEGPEYWDRETQKYKRQAQTDRVNLRKLRGYYNQSEA
GSHTLQRMYGCDLGPDGRLLRGYNQFAYDGKDYIALNEDLRSWTA
ADKAAQITQRKWEAAREAEQRRAYLEGTCVEWLRRYLENGKKTLQ
RAEHPKTHVTHHPVSDHEATLRCWALGFYPAEITLTWQRDGEDQT
QDTELVETRPAGDGTFQKWAAVVVPSGEEQRYTCHVQHEGLPEPL
TLRWGPSSQPTIPIVGIVAGLAVLAVLAVLGAVMAVVMCRRKSSG
GKGGSCSQAASSNSAQGSDESLIACKA;
and
HLA-C*07
(SEQ ID NO: 451)
CSHSMRYFDTAVSRPGRGEPRFISVGYVDDTQFVRFDSDAASPRG
EPRAPWVEQEGPEYWDRETQKYKRQAQADRVSLRNLRGYYNQSED
GSHTLQRMSGCDLGPDGRLLRGYDQSAYDGKDYIALNEDLRSWTA
ADTAAQITQRKLEAARAAEQLRAYLEGTCVEWLRRYLENGKETLQ
RAEPPKTHVTHHPLSDHEATLRCWALGFYPAEITLTWQRDGEDQT
QDTELVETRPAGDGTFQKWAAVVVPSGQEQRYTCHMQHEGLQEPL
TLSWEPSSQPTIPIMGIVAGLAVLVVLAVLGAVVTAMMCRRKSSG
GKGGSCSQAACSNSAQGSDESLITCKA.

[0028] In any aspect of the disclosure delineated herein, or embodiments thereof, the B2M polypeptide contains a sequence with at least 85% sequence identity to the amino acid sequence

(SEQ ID NO: 426)
IQRTPKIQVYSRHPAENGKSNFLNCYVSGFHPSDIEVDLLKNGERIEKV
EHSDLSFSKDWSFYLLYYTEFTPTEKDEYACRVNHVTLSQPKIVKWDRD
M.

[0029] In any aspect of the disclosure delineated herein, or embodiments thereof, the fusion polypeptide contains from N-terminus to C-terminus: A) the B2M polypeptide and the HLA heavy chain polypeptide; B) the B2M polypeptide, a linker, and the HLA heavy chain polypeptide; C) a cognate peptide (cPep), the B2M polypeptide, and the HLA heavy chain polypeptide; D) a cognate peptide (cPep), the B2M polypeptide, a linker, and the HLA heavy chain polypeptide; E) a cognate peptide (cPep), a linker, the B2M polypeptide, a linker, and the HLA heavy chain polypeptide; F) a signal peptide, the B2M polypeptide, a linker, and the HLA heavy chain polypeptide; G) a signal peptide, the B2M polypeptide and the HLA heavy chain polypeptide; H) a signal peptide, the B2M polypeptide, a linker, and the HLA heavy chain polypeptide; I) a signal peptide, a cognate peptide (cPep), the B2M polypeptide, and the HLA heavy chain polypeptide; J) a signal peptide, a cognate peptide (cPep), the B2M polypeptide, a linker, and the HLA heavy chain polypeptide; or K) a signal peptide, a cognate peptide (cPep), a linker, the B2M polypeptide, a linker, and the HLA heavy chain polypeptide.

[0030] In any aspect of the disclosure delineated herein, or embodiments thereof, the fusion polypeptide further contains a transmembrane domain C-terminal to the HLA heavy chain polypeptide.

[0031] In any aspect of the disclosure delineated herein, or embodiments thereof, the polynucleotide contains a sequence with at least 85% sequence identity to a polynucleotide sequence listed in Table 8B.

[0032] In any aspect of the disclosure delineated herein, or embodiments thereof, the vector is a viral vector or a transposon. In any aspect of the disclosure delineated herein, or embodiments thereof, the vector is a lentiviral vector.

[0033] In any aspect of the disclosure delineated herein, or embodiments thereof, the cell is an immune cell, a hepatocyte, a stem cell, an induced pluripotent stem cell, an islet cell, or a progenitor thereof.

[0034] In any aspect of the disclosure delineated herein, or embodiments thereof, the method further involves contacting the cell with a vector containing the polynucleotide.

[0035] In any aspect of the disclosure delineated herein, or embodiments thereof, modifying the cell to knock-out expression of B2M is carried out using base editing. In embodiments, the base editing involves contacting the cell with a base editor and a guide polynucleotide targeting the base editor to effect an alteration of a nucleobase of an endogenous B2M gene in the cell, thereby knocking out expression of the endogenous B2M polypeptide in the cell. In embodiments, the base editor is a cytidine deaminase base editor, an adenosine deaminase base editor, or a cytidine adenosine deaminase base editor. In embodiments, the adenosine deaminase is TadA or a TadA variant. In embodiments, the TadA variant is a TadA*8 or TadA*9. In embodiments, the cytidine deaminase is APOBEC or an APOBEC variant. In embodiments, the deaminase is TadA*8.20 In embodiments, the guide polynucleotide contains a spacer containing the nucleotide sequence CUUACCCCACUUAACUAUCU (SEQ ID NO: 537). In embodiments, the guide polynucleotide contains a scaffold containing the nucleotide sequence

(SEQ ID NO: 626)
GUUUUAGAGCUAGAAAUAGCAAGUUAAAAUAAGGCUAGUCCGUUAUCAA
CUUGAAAAAGUGGCACCGAGUCGGUGCUUUU.

[0036] In any aspect of the disclosure delineated herein, or embodiments thereof, the method further involves expressing a chimeric antigen receptor in the cell.

[0037] In any aspect of the disclosure delineated herein, or embodiments thereof, the chimeric antigen receptor targets an antigen expressed on the surface of a neoplastic cell.

[0038] In any aspect of the disclosure delineated herein, or embodiments thereof, the cell is a T cell, a natural killer cell, a hepatocyte, a stem cell, an induced pluripotent stem cell, an islet cell, or a progenitor thereof. In any aspect of the disclosure delineated herein, or embodiments thereof, the cell is a CD4+ or CD8+ cell. In any aspect of the disclosure delineated herein, or embodiments thereof, the cell is an allogeneic cell. In any aspect of the disclosure delineated herein, or embodiments thereof, the cell is suitable for use in tissue regeneration.

[0039] In any aspect of the disclosure delineated herein, or embodiments thereof, the modified cell shows increased resistance to lysis by an immune effector cell relative to a reference cell. In embodiments, lysis is reduced by at least about 60%. In embodiments, lysis is reduced by at least about 90%.

[0040] In any aspect of the disclosure delineated herein, or embodiments thereof, an alloreactive T cell contacted with the modified cell shows reduced levels of cytokine production relative to levels produced when the alloreactive T cell is contacted with a reference cell. In embodiments, granzyme B (GZMB) secreted by the alloreactive T cell is reduced by at least about 10%. In embodiments, granzyme B (GZMB) secreted by the alloreactive T cell is reduced by at least about 50%. In embodiments, INF-gamma secreted by the alloreactive T cell is reduced by at least about 10%. In embodiments, INF-gamma secreted by the alloreactive T cell is reduced by at least about 40%. In embodiments, TNF-alpha secreted by the alloreactive T cell is reduced by at least about 10%. In embodiments, TNF-alpha secreted by the alloreactive T cell is reduced by at least about 40%. In any aspect of the disclosure delineated herein, or embodiments thereof, a natural killer cell contacted with the modified cell shows reduced levels of granulation relative to levels measured when the natural killer cell is contacted with a reference cell.

[0041] In any aspect of the disclosure delineated herein, or embodiments thereof, the modified cell further contains virtually undetectable levels of HLA-A and HLA-B.

[0042] In any aspect of the disclosure delineated herein, or embodiments thereof, the B2M polypeptide is expressed in the cell under the control of a promoter. In embodiments, the promoter is an EF1a promoter.

[0043] In any aspect of the disclosure delineated herein, or embodiments thereof, the B2M polypeptide contains an alteration at amino acid position K58, W60, and/or position W95. In any aspect of the disclosure delineated herein, or embodiments thereof, the B2M polypeptide contains a K58E, W60G, and/or W95G amino acid alteration.

[0044] In any aspect of the disclosure delineated herein, or embodiments thereof, the method effects a reduction in levels of surface expression of an HLA-A, HLA-B, and/or HLA-C polypeptide on the cell relative to a reference cell. In embodiments, surface expression is reduced by at least about 40%. In embodiments, surface expression is reduced by at least about 80%.

[0045] In any aspect of the disclosure delineated herein, or embodiments thereof, expression of the B2M polypeptide is reduced by at least about 75% relative to an unmodified cell. In any aspect of the disclosure delineated herein, or embodiments thereof, expression of the B2M polypeptide is reduced by at least about 90% relative to an unmodified cell.

[0046] In any aspect of the disclosure delineated herein, or embodiments thereof, the cell expresses a chimeric antigen receptor that binds an antigen expressed on the surface of a neoplastic cell.

[0047] In any aspect of the disclosure delineated herein, or embodiments thereof, the HLA heavy chain polypeptide comprises the alterations D227K, T228A, and A245V. In any aspect of the disclosure delineated herein, or embodiments thereof, the B2M polypeptide comprises the alteration K58E. In any aspect of the disclosure delineated herein, or embodiments thereof, the B2M polypeptide comprises the alteration W60G. In any aspect of the disclosure delineated herein, or embodiments thereof, the B2M polypeptide comprises the alteration W95G. In any aspect of the disclosure delineated herein, or embodiments thereof, the B2M polypeptide comprises the alteration K58E and W60G.

[0048] In any aspect of the disclosure delineated herein, or embodiments thereof, the cell is a T cell or a natural killer (NK) cell or a progenitor thereof.

[0049] In any aspect of the disclosure delineated herein, or embodiments thereof, the HLA heavy chain polypeptide belongs to an HLA-A superfamily selected from the group consisting of A1, A2, A3, A24, and A6X. In any aspect of the disclosure delineated herein, or embodiments thereof, the HLA heavy chain polypeptide belongs to an HLA-B superfamily selected from the group consisting of B7, B8, B27, B44, B58, and B62.

[0050] In any aspect of the disclosure delineated herein, or embodiments thereof, the HLA heavy chain polypeptide is an HLA-E polypeptide and the B2M polypeptide contains an amino acid alteration that reduces affinity for CD8 binding. In embodiments, the HLA-E polypeptide is a wild-type polypeptide.

[0051] In any aspect of the disclosure delineated herein, or embodiments thereof, the fusion polypeptide further comprises an effector domain. In embodiments, the effector domain is an immunosuppressive domain. In embodiments, the effector domain is selected from one or more of a CTLA4 domain, a PDL1 domain, an additional B2M polypeptide domain, an HLA heavy chain polypeptide domain, and a CD47 domain.

[0052] In any aspect of the disclosure delineated herein, or embodiments thereof, the fusion polypeptide further comprises a tag or marker (e.g., a fluorescent protein, such as green fluorescent protein, a His tag, or a FLAG tag). In some embodiments, the fusion protein comprises a kill switch (e.g., RQR8 or ADC target).

[0053] In any aspect of the disclosure delineated herein, or embodiments thereof, the cells express two or more fusion polypeptides, where the cells expressing the two or more fusion polypeptides have improved resistance to lysis by natural killer cell (NK) cells having two or more different KIR types relative to cells expressing only one of the fusion polypeptides. In any aspect of the disclosure delineated herein, or embodiments thereof, the cells express two or more fusion polypeptides, where natural killer (NK) cells having two or more different KIR types contacted with the cells expressing the two or more fusion polypeptides show reduced granulation levels relative to the natural killer (NK) contacted with cells expressing only one of the fusion polypeptides. In embodiments, each of the two or more fusion polypeptides contain a different HLA polypeptide. In embodiments, each of the different HLA polypeptides inhibits natural killer cells having a different KIR type. In some embodiments, the modified cells express at least two fusion proteins, wherein each fusion protein targets KIR2DL1, KIR2DL2, KIR2DL3, or KIR3DL1. In some embodiments, one or more of the fusion proteins targets at least two KIRS (e.g., two or more KIRS selected from KIR2DL1, KIR2DL2, KIR2DL3, and KIR3DL1).

[0054] In any aspect of the disclosure delineated herein, or embodiments thereof, the methods further involve base editing the cells to knock-out expression of HLA-A and/or HLA-B.

[0055] In any aspect of the disclosure delineated herein, or embodiments thereof, the polynucleotide is inserted into the genome of a cell using homology-directed repair (HDR). In embodiments, the homology-directed repair involves the use of a nucleic acid programmable DNA binding protein. In some embodiments, the nucleic acid programmable DNA binding protein is a Cas12b polypeptide.

[0056] In any aspect provided herein, or embodiments thereof, the method is not a process for modifying the germline genetic identity of human beings.

### Definitions

[0057] Unless defined otherwise, all technical and scientific terms used herein have the meaning commonly understood by a person skilled in the art to which this disclosure belongs. The following references provide one of skill with a general definition of many of the terms used in this disclosure: Singleton et al., Dictionary of Microbiology and Molecular Biology (2nd ed. 1994); The Cambridge Dictionary of Science and Technology (Walker ed., 1988); The Glossary of Genetics, 5th Ed., R. Rieger et al. (eds.), Springer Verlag (1991); and Hale & Marham, The Harper Collins Dictionary of Biology (1991). As used herein, the following terms have the meanings ascribed to them below, unless specified otherwise.

[0058] By “adenine” or “9H-Purin-6-amine” is meant a purine nucleobase with the molecular formula C₅H₅N₅, having the structure

[chemical structure]

and corresponding to CAS No. 73-24-5.

[0059] By “adenosine” or “4-Amino-1-[(2R,3R,4S,5R)-3,4-dihydroxy-5-(hydroxymethyl)oxolan-2-yl]pyrimidin-2 (1H)-one” is meant an adenine molecule attached to a ribose sugar via a glycosidic bond, having the structure

[chemical structure]

and corresponding to CAS No. 65-46-3. Its molecular formula is C₁₀H₁₃N₅O₄.

[0060] By “adenosine deaminase” or “adenine deaminase” is meant a polypeptide or fragment thereof capable of catalyzing the hydrolytic deamination of adenine or adenosine. In some embodiments, the deaminase or deaminase domain is an adenosine deaminase catalyzing the hydrolytic deamination of adenosine to inosine or deoxy adenosine to deoxyinosine. In some embodiments, the adenosine deaminase catalyzes the hydrolytic deamination of adenine or adenosine in deoxyribonucleic acid (DNA). The adenosine deaminases (e.g. engineered adenosine deaminases, evolved adenosine deaminases) provided herein may be from any organism (e.g., eukaryotic, prokaryotic), including but not limited to algae, bacteria, fungi, plants, invertebrates (e.g., insects), and vertebrates (e.g., amphibians, mammals). In some embodiments, the adenosine deaminase is an adenosine deaminase variant with one or more alterations and is capable of deaminating both adenine and cytosine in a target polynucleotide (e.g., DNA, RNA) and may be referred to as a “dual deaminase”. Non-limiting examples of dual deaminases include those described in PCT/US22/22050. In some embodiments, the target polynucleotide is single or double stranded. In some embodiments, the adenosine deaminase variant is capable of deaminating both adenine and cytosine in DNA. In some embodiments, the adenosine deaminase variant is capable of deaminating both adenine and cytosine in single-stranded DNA. In some embodiments, the adenosine deaminase variant is capable of deaminating both adenine and cytosine in RNA. In embodiments, the adenosine deaminase variant is selected from those described in PCT/US2020/018192, PCT/US2020/049975, PCT/US2017/045381, and PCT/US2020/028568, the full contents of which are each incorporated herein by reference in their entireties for all purposes.

[0061] By “adenosine deaminase activity” is meant catalyzing the deamination of adenine or adenosine to guanine in a polynucleotide. In some embodiments, an adenosine deaminase variant as provided herein maintains adenosine deaminase activity (e.g., at least about 30%, 40%, 50%, 60%, 70%, 80%, 90% or more of the activity of a reference adenosine deaminase (e.g., TadA*8.20 or TadA*8.19)).

[0062] By “Adenosine Base Editor (ABE)” is meant a base editor comprising an adenosine deaminase.

[0063] By “Adenosine Base Editor (ABE) polynucleotide” is meant a polynucleotide encoding an ABE.

[0064] By “Adenosine Base Editor 8 (ABE8) polypeptide” or “ABE8” is meant a base editor as defined herein comprising an adenosine deaminase or adenosine deaminase variant comprising one or more of the alterations listed in Table 5B, one of the combinations of alterations listed in Table 5B, or an alteration at one or more of the amino acid positions listed in Table 5B, such alterations are relative to the following reference sequence: MSEVEFSHEYWMRHALTLAKRARDEREVPVGAVLVLNNRVIGEGWNRAIGLHDPTAHAEIMALR QGGLVMQNYRLIDATLYVTFEPCVMCAGAMIHSRIGRVVFGVRNAKTGAAGSLMDVLHYPGMNH RVEITEGILADECAALLCYFFRMPRQVFNAQKKAQSSTD (SEQ ID NO: 1), or a corresponding position in another adenosine deaminase. In embodiments, ABE8 comprises alterations at amino acids 82 and/or 166 of SEQ ID NO: 1 In some embodiments, ABE8 comprises further alterations, as described herein, relative to the reference sequence.

[0065] By “Adenosine Base Editor 8 (ABE8) polynucleotide” is meant a polynucleotide encoding an ABE8 polypeptide.

[0066] “Allogeneic,” as used herein, refers to cells that are genetically dissimilar and immunologically incompatible.

[0067] “Administering” is referred to herein as providing one or more compositions described herein to a patient or a subject.

[0068] By “agent” is meant any cellular therapeutic, small molecule chemical compound, antibody, nucleic acid molecule, or polypeptide, or functional fragments thereof. In an embodiment, the agent is an immune effector cell (e.g., T cell, NK cell) expressing B2M fused to HLA-A, -B, or -C. In an embodiment, the agent is an immune effector cell (e.g., T cell, NK cell) with endogenous B2M knockout and expressing a heterologous B2M transgene.

[0069] By “alteration” is meant a change in the level, structure, or activity of an analyte, gene or polypeptide as detected by standard art known methods such as those described herein. As used herein, an alteration includes a change (e.g. increase or reduction) in expression levels. In embodiments, the increase or reduction in expression levels is by 10%, 25%, 40%, 50% or greater. In some embodiments, an alteration includes an insertion, deletion, or substitution of a nucleobase or amino acid (by, e.g., genetic engineering).

[0070] By “ameliorate” is meant reduce, suppress, attenuate, diminish, arrest, or stabilize the development or progression of a disease.

[0071] By “analog” is meant a molecule that is not identical, but has analogous functional or structural features. For example, a polypeptide analog retains the biological activity of a corresponding naturally-occurring polypeptide, while having certain biochemical modifications that enhance the analog's function relative to a naturally occurring polypeptide. Such biochemical modifications could increase the analog's protease resistance, membrane permeability, or half-life, without altering, for example, ligand binding. An analog may include an unnatural amino acid.

[0072] “Autologous,” as used herein, refers to cells from the same subject.

[0073] By “base editor (BE),” or “nucleobase editor polypeptide (NBE)” is meant an agent that binds a polynucleotide and has nucleobase modifying activity. In various embodiments, the base editor comprises a nucleobase modifying polypeptide (e.g., a deaminase) and a polynucleotide programmable nucleotide binding domain (e.g., Cas9 or Cpf1) in conjunction with a guide polynucleotide (e.g., guide RNA (gRNA)). Representative nucleic acid and protein sequences of base editors include those sequences having about or at least about 85% sequence identity to any base editor sequence provided in the sequence listing, such as those corresponding to SEQ ID NOs: 2-11.

[0074] By “BE4 cytidine deaminase (BE4) polypeptide,” is meant a base editor comprising a nucleic acid programmable DNA binding protein (napDNAbp) domain, a cytidine deaminase domain, and two uracil glycosylase inhibitor domains (UGIs). In embodiments, the napDNAbp is a Cas9n (D10A) polypeptide. Non-limiting examples of cytidine deaminase domains include rAPOBEC, ppAPOBEC, RrA3F, AmAPOBEC1, and SsAPOBEC3B.

[0075] By “BE4 cytidine deaminase (BE4) polynucleotide,” is meant a polynucleotide encoding a BE4 polypeptide.

[0076] By “base editing activity” is meant acting to chemically alter a base within a polynucleotide. In one embodiment, a first base is converted to a second base. In one embodiment, the base editing activity is cytidine deaminase activity, e.g., converting target C·G to T·A. In another embodiment, the base editing activity is adenosine or adenine deaminase activity, e.g., converting A·T to G·C.

[0077] By “beta-2 microglobulin (B2M; B2M) polypeptide” is meant a protein having at least about 85% amino acid sequence identity to one or more of the exemplary B2M polypeptide sequences provided below, or a functional fragment thereof having immunomodulatory activity. In embodiments, the B2M polypeptide contains a modification at one or more of positions selected from K58, W60, and W95 (e.g., a K58E, W60G, and/or W95G alteration) or a corresponding position(s), where the positions are numbered relative to the “B2M Reference Sequence” provided below. Exemplary human B2M polypeptide sequences are provided below and include the sequence corresponding to UniProt Accession No. P61769, the “B2M Reference Sequence,” and the B2M (K58E), B2M (K58E/W60G), B2M (W60G), and B2M (W95G) amino acid sequences.

>sp|P61769|B2MG_HUMAN Beta-2-microglobulin
OS = Homo sapiens OX = 9606 GN = B2M
PE = 1 SV = 1
(SEQ ID NO: 425)
MSRSVALAVLALLSLSGLEAIQRTPKIQVYSRHPAENGKSNFLNCYVSGFHPSDIEVDLLKNGE
RIEKVEHSDLSFSKDWSFYLLYYTEFTPTEKDEYACRVNHVTLSQPKIVKWDRDM.
>B2M Reference Sequence
(SEQ ID NO: 426)
[sequence omitted]
>B2M (K58E) amino acid sequence
(SEQ ID NO: 427)
MSRSVALAVLALLSLSGLEAIQRTPKIQVYSRHPAENGKSNFLNCYVSGFHPSDIEVDLLKNGE
RIEKVEHSDLSFSEDWSFYLLYYTEFTPTEKDEYACRVNHVTLSQPKIVKWDRDM.
>B2M (K58E/W60G) amino acid sequence
(SEQ ID NO: 428)
MSRSVALAVLALLSLSGLEAIQRTPKIQVYSRHPAENGKSNFLNCYVSGFHPSDIEVDLLKNGE
RIEKVEHSDLSFSKDGSFYLLYYTEFTPTEKDEYACRVNHVTLSQPKIVKWDRDM.
>B2M (W60G) amino acid sequence
(SEQ ID NO: 429)
MSRSVALAVLALLSLSGLEAIQRTPKIQVYSRHPAENGKSNFLNCYVSGFHPSDIEVDLLKNGE
RIEKVEHSDLSFSEDGSFYLLYYTEFTPTEKDEYACRVNHVTLSQPKIVKWDRDM.
>B2M (W95G) amino acid sequence
(SEQ ID NO: 430)
MSRSVALAVLALLSLSGLEAIQRTPKIQVYSRHPAENGKSNFLNCYVSGFHPSDIEVDLLKNGE
RIEKVEHSDLSFSKDWSFYLLYYTEFTPTEKDEYACRVNHVTLSQPKIVKGDRDM.

[0078] By “beta-2-microglobulin (B2M; B2M) polynucleotide” is meant a nucleic acid molecule encoding an β2M polypeptide, as well as the introns, exons, 3′ untranslated regions, 5′ untranslated regions, and regulatory sequences associated with its expression, or fragments thereof. The beta-2-microglobulin gene encodes a serum protein associated with the major histocompatibility complex. B2M is involved in non-self recognition by host CD8⁺ T cells.

[0079] Exemplary β2M polynucleotide sequences are provided below and include Genbank Accession No. DQ217933.1 and the B2M (WT), B2M (K58E), B2M (K58E/W60G), and B2M (W60G) nucleotide sequences.

>DQ217933.1 Homo sapiens beta-2-microglobin (β2M) gene, complete cds
(SEQ ID NO: 431)
CATGTCATAAATGGTAAGTCCAAGAAAAATACAGGTATTCCCCCCCAAAGAAAACTGTAAAATC
GACTTTTTTCTATCTGTACTGTTTTTTATTGGTTTTTAAATTGGTTTTCCAAGTGAGTAAATCA
GAATCTATCTGTAATGGATTTTAAATTTAGTGTTTCTCTGTGATGTAGTAAACAAGAAACTAGA
GGCAAAAATAGCCCTGTCCCTTGCTAAACTTCTAAGGCACTTTTCTAGTACAACTCAACACTAA
CATTTCAGGCCTTTAGTGCCTTATATGAGTTTTTAAAAGGGGGAAAAGGGAGGGAGCAAGAGTG
TCTTAACTCATACATTTAGGCATAACAATTATTCTCATATTTTAGTTATTGAGAGGGCTGGTAG
AAAAACTAGGTAAATAATATTAATAATTATAGCGCTTATTAAACACTACAGAACACTTACTATG
TACCAGGCATTGTGGGAGGCTCTCTCTTGTGCATTATCTCATTTCATTAGGTCCATGGAGAGTA
TTGCATTTTCTTAGTTTAGGCATGGCCTCCACAATAAAGATTATCAAAAGCCTAAAAATATGTA
AAAGAAACCTAGAAGTTATTTGTTGTGCTCCTTGGGGAAGCTAGGCAAATCCTTTCAACTGAAA
ACCATGGTGACTTCCAAGATCTCTGCCCCTCCCCATCGCCATGGTCCACTTCCTCTTCTCACTG
TTCCTCTTAGAAAAGATCTGTGGACTCCACCACCACGAAATGGCGGCACCTTATTTATGGTCAC
TTTAGAGGGTAGGTTTTCTTAATGGGTCTGCCTGTCATGTTTAACGTCCTTGGCTGGGTCCAAG
GCAGATGCAGTCCAAACTCTCACTAAAATTGCCGAGCCCTTTGTCTTCCAGTGTCTAAAATATT
AATGTCAATGGAATCAGGCCAGAGTTTGAATTCTAGTCTCTTAGCCTTTGTTTCCCCTGTCCAT
AAAATGAATGGGGGTAATTCTTTCCTCCTACAGTTTATTTATATATTCACTAATTCATTCATTC
ATCCATCCATTCGTTCATTCGGTTTACTGAGTACCTACTATGTGCCAGCCCCTGTTCTAGGGTG
GAAACTAAGAGAATGATGTACCTAGAGGGCGCTGGAAGCTCTAAAGCCCTAGCAGTTACTGCTT
TTACTATTAGTGGTCGTTTTTTTCTCCCCCCCGCCCCCCGACAAATCAACAGAACAAAGAAAAT
TACCTAAACAGCAAGGACATAGGGAGGAACTTCTTGGCACAGAACTTTCCAAACACTTTTTCCT
GAAGGGATACAAGAAGCAAGAAAGGTACTCTTTCACTAGGACCTTCTCTGAGCTGTCCTCAGGA
TGCTTTTGGGACTATTTTTCTTACCCAGAGAATGGAGAAACCCTGCAGGGAATTCCCAAGCTGT
AGTTATAAACAGAAGTTCTCCTTCTGCTAGGTAGCATTCAAAGATCTTAATCTTCTGGGTTTCC
GTTTTCTCGAATGAAAAATGCAGGTCCGAGCAGTTAACTGGCTGGGGCACCATTAGCAAGTCAC
TTAGCATCTCTGGGGCCAGTCTGCAAAGCGAGGGGGCAGCCTTAATGTGCCTCCAGCCTGAAGT
CCTAGAATGAGCGCCCGGTGTCCCAAGCTGGGGCGCGCACCCCAGATCGGAGGGCGCCGATGTA
CAGACAGCAAACTCACCCAGTCTAGTGCATGCCTTCTTAAACATCACGAGACTCTAAGAAAAGG
AAACTGAAAACGGGAAAGTCCCTCTCTCTAACCTGGCACTGCGTCGCTGGCTTGGAGACAGGTG
ACGGTCCCTGCGGGCCTTGTCCTGATTGGCTGGGCACGCGTTTAATATAAGTGGAGGCGTCGCG
CTGGCGGGCATTCCTGAAGCTGACAGCATTCGGGCCGAGATGTCTCGCTCCGTGGCCTTAGCTG
TGCTCGCGCTACTCTCTCTTTCTGGCCTGGAGGCTATCCAGCGTGAGTCTCTCCTACCCTCCCG
CTCTGGTCCTTCCTCTCCCGCTCTGCACCCTCTGTGGCCCTCGCTGTGCTCTCTCGCTCCGTGA
CTTCCCTTCTCCAAGTTCTCCTTGGTGGCCCGCCGTGGGGCTAGTCCAGGGCTGGATCTCGGGG
AAGCGGCGGGGTGGCCTGGGAGTGGGGAAGGGGGTGCGCACCCGGGACGCGCGCTACTTGCCCC
TTTCGGCGGGGAGCAGGGGAGACCTTTGGCCTACGGCGACGGGAGGGTCGGGACAAAGTTTAGG
GCGTCGATAAGCGTCAGAGCGCCGAGGTTGGGGGAGGGTTTCTCTTCCGCTCTTTCGCGGGGCC
TCTGGCTCCCCCAGCGCAGCTGGAGTGGGGGACGGGTAGGCTCGTCCCAAAGGCGCGGCGCTGA
GGTTTGTGAACGCGTGGAGGGGCGCTTGGGGTCTGGGGGAGGCGTCGCCCGGGTAAGCCTGTCT
GCTGCGGCTCTGCTTCCCTTAGACTGGAGAGCTGTGGACTTCGTCTAGGCGCCCGCTAAGTTCG
CATGTCCTAGCACCTCTGGGTCTATGTGGGGCCACACCGTGGGGAGGAAACAGCACGCGACGTT
TGTAGAATGCTTGGCTGTGATACAAAGCGGTTTCGAATAATTAACTTATTTGTTCCCATCACAT
GTCACTTTTAAAAAATTATAAGAACTACCCGTTATTGACATCTTTCTGTGTGCCAAGGACTTTA
TGTGCTTTGCGTCATTTAATTTTGAAAACAGTTATCTTCCGCCATAGATAACTACTATGGTTAT
CTTCTGCCTCTCACAGATGAAGAAACTAAGGCACCGAGATTTTAAGAAACTTAATTACACAGGG
GATAAATGGCAGCAATCGAGATTGAAGTCAAGCCTAACCAGGGCTTTTGCGGGAGCGCATGCCT
TTTGGCTGTAATTCGTGCATTTTTTTTTAAGAAAAACGCCTGCCTTCTGCGTGAGATTCTCCAG
AGCAAACTGGGCGGCATGGGCCCTGTGGTCTTTTCGTACAGAGGGCTTCCTCTTTGGCTCTTTG
CCTGGTTGTTTCCAAGATGTACTGTGCCTCTTACTTTCGGTTTTGAAAACATGAGGGGGTTGGG
CGTGGTAGCTTACGCCTGTAATCCCAGCACTTAGGGAGGCCGAGGCGGGAGGATGGCTTGAGGT
CCGTAGTTGAGACCAGCCTGGCCAACATGGTGAAGCCTGGTCTCTACAAAAAATAATAACAAAA
ATTAGCCGGGTGTGGTGGCTCGTGCCTGTGGTCCCAGCTGCTCCGGTGGCTGAGGCGGGAGGAT
CTCTTGAGCTTAGGCTTTTGAGCTATCATGGCGCCAGTGCACTCCAGCGTGGGCAACAGAGCGA
GACCCTGTCTCTCAAAAAAGAAAAAAAAAAAAAAAGAAAGAGAAAAGAAAAGAAAGAAAGAAGT
GAAGGTTTGTCAGTCAGGGGAGCTGTAAAACCATTAATAAAGATAATCCAAGATGGTTACCAAG
ACTGTTGAGGACGCCAGAGATCTTGAGCACTTTCTAAGTACCTGGCAATACACTAAGCGCGCTC
ACCTTTTCCTCTGGCAAAACATGATCGAAAGCAGAATGTTTTGATCATGAGAAAATTGCATTTA
ATTTGAATACAATTTATTTACAACATAAAGGATAATGTATATATCACCACCATTACTGGTATTT
GCTGGTTATGTTAGATGTCATTTTAAAAAATAACAATCTGATATTTAAAAAAAAATCTTATTTT
GAAAATTTCCAAAGTAATACATGCCATGCATAGACCATTTCTGGAAGATACCACAAGAAACATG
TAATGATGATTGCCTCTGAAGGTCTATTTTCCTCCTCTGACCTGTGTGTGGGTTTTGTTTTTGT
TTTACTGTGGGCATAAATTAATTTTTCAGTTAAGTTTTGGAAGCTTAAATAACTCTCCAAAAGT
CATAAAGCCAGTAACTGGTTGAGCCCAAATTCAAACCCAGCCTGTCTGATACTTGTCCTCTTCT
TAGAAAAGATTACAGTGATGCTCTCACAAAATCTTGCCGCCTTCCCTCAAACAGAGAGTTCCAG
GCAGGATGAATCTGTGCTCTGATCCCTGAGGCATTTAATATGTTCTTATTATTAGAAGCTCAGA
TGCAAAGAGCTCTCTTAGCTTTTAATGTTATGAAAAAAATCAGGTCTTCATTAGATTCCCCAAT
CCACCTCTTGATGGGGCTAGTAGCCTTTCCTTAATGATAGGGTGTTTCTAGAGAGATATATCTG
GTCAAGGTGGCCTGGTACTCCTCCTTCTCCCCACAGCCTCCCAGACAAGGAGGAGTAGCTGCCT
TTTAGTGATCATGTACCCTGAATATAAGTGTATTTAAAAGAATTTTATACACATATATTTAGTG
TCAATCTGTATATTTAGTAGCACTAACACTTCTCTTCATTTTCAATGAAAAATATAGAGTTTAT
AATATTTTCTTCCCACTTCCCCATGGATGGTCTAGTCATGCCTCTCATTTTGGAAAGTACTGTT
TCTGAAACATTAGGCAATATATTCCCAACCTGGCTAGTTTACAGCAATCACCTGTGGATGCTAA
TTAAAACGCAAATCCCACTGTCACATGCATTACTCCATTTGATCATAATGGAAAGTATGTTCTG
TCCCATTTGCCATAGTCCTCACCTATCCCTGTTGTATTTTATCGGGTCCAACTCAACCATTTAA
GGTATTTGCCAGCTCTTGTATGCATTTAGGTTTTGTTTCTTTGTTTTTTAGCTCATGAAATTAG
GTACAAAGTCAGAGAGGGGTCTGGCATATAAAACCTCAGCAGAAATAAAGAGGTTTTGTTGTTT
GGTAAGAACATACCTTGGGTTGGTTGGGCACGGTGGCTCGTGCCTGTAATCCCAACACTTTGGG
AGGCCAAGGCAGGCTGATCACTTGAAGTTGGGAGTTCAAGACCAGCCTGGCCAACATGGTGAAA
TCCCGTCTCTACTGAAAATACAAAAATTAACCAGGCATGGTGGTGTGTGCCTGTAGTCCCAGGA
ATCACTTGAACCCAGGAGGCGGAGGTTGCAGTGAGCTGAGATCTCACCACTGCACACTGCACTC
CAGCCTGGGCAATGGAATGAGATTCCATCCCAAAAAATAAAAAAATAAAAAAATAAAGAACATA
CCTTGGGTTGATCCACTTAGGAACCTCAGATAATAACATCTGCCACGTATAGAGCAATTGCTAT
GTCCCAGGCACTCTACTAGACACTTCATACAGTTTAGAAAATCAGATGGGTGTAGATCAAGGCA
GGAGCAGGAACCAAAAAGAAAGGCATAAACATAAGAAAAAAAATGGAAGGGGTGGAAACAGAGT
ACAATAACATGAGTAATTTGATGGGGGCTATTATGAACTGAGAAATGAACTTTGAAAAGTATCT
TGGGGCCAAATCATGTAGACTCTTGAGTGATGTGTTAAGGAATGCTATGAGTGCTGAGAGGGCA
TCAGAAGTCCTTGAGAGCCTCCAGAGAAAGGCTCTTAAAAATGCAGCGCAATCTCCAGTGACAG
AAGATACTGCTAGAAATCTGCTAGAAAAAAAACAAAAAAGGCATGTATAGAGGAATTATGAGGG
AAAGATACCAAGTCACGGTTTATTCTTCAAAATGGAGGTGGCTTGTTGGGAAGGTGGAAGCTCA
TTTGGCCAGAGTGGAAATGGAATTGGGAGAAATCGATGACCAAATGTAAACACTTGGTGCCTGA
TATAGCTTGACACCAAGTTAGCCCCAAGTGAAATACCCTGGCAATATTAATGTGTCTTTTCCCG
ATATTCCTCAGGTACTCCAAAGATTCAGGTTTACTCACGTCATCCAGCAGAGAATGGAAAGTCA
AATTTCCTGAATTGCTATGTGTCTGGGTTTCATCCATCCGACATTGAAGTTGACTTACTGAAGA
ATGGAGAGAGAATTGAAAAAGTGGAGCATTCAGACTTGTCTTTCAGCAAGGACTGGTCTTTCTA
TCTCTTGTACTACACTGAATTCACCCCCACTGAAAAAGATGAGTATGCCTGCCGTGTGAACCAT
GTGACTTTGTCACAGCCCAAGATAGTTAAGTGGGGTAAGTCTTACATTCTTTTGTAAGCTGCTG
AAAGTTGTGTATGAGTAGTCATATCATAAAGCTGCTTTGATATAAAAAAGGTCTATGGCCATAC
TACCCTGAATGAGTCCCATCCCATCTGATATAAACAATCTGCATATTGGGATTGTCAGGGAATG
TTCTTAAAGATCAGATTAGTGGCACCTGCTGAGATACTGATGCACAGCATGGTTTCTGAACCAG
TAGTTTCCCTGCAGTTGAGCAGGGAGCAGCAGCAGCACTTGCACAAATACATATACACTCTTAA
CACTTCTTACCTACTGGCTTCCTCTAGCTTTTGTGGCAGCTTCAGGTATATTTAGCACTGAACG
AACATCTCAAGAAGGTATAGGCCTTTGTTTGTAAGTCCTGCTGTCCTAGCATCCTATAATCCTG
GACTTCTCCAGTACTTTCTGGCTGGATTGGTATCTGAGGCTAGTAGGAAGGGCTTGTTCCTGCT
GGGTAGCTCTAAACAATGTATTCATGGGTAGGAACAGCAGCCTATTCTGCCAGCCTTATTTCTA
ACCATTTTAGACATTTGTTAGTACATGGTATTTTAAAAGTAAAACTTAATGTCTTCCTTTTTTT
TCTCCACTGTCTTTTTCATAGATCGAGACATGTAAGCAGCATCATGGAGGTAAGTTTTTGACCT
TGAGAAAATGTTTTTGTTTCACTGTCCTGAGGACTATTTATAGACAGCTCTAACATGATAACCC
TCACTATGTGGAGAACATTGACAGAGTAACATTTTAGCAGGGAAAGAAGAATCCTACAGGGTCA
TGTTCCCTTCTCCTGTGGAGTGGCATGAAGAAGGTGTATGGCCCCAGGTATGGCCATATTACTG
ACCCTCTACAGAGAGGGCAAAGGAACTGCCAGTATGGTATTGCAGGATAAAGGCAGGTGGTTAC
CCACATTACCTGCAAGGCTTTGATCTTTCTTCTGCCATTTCCACATTGGACATCTCTGCTGAGG
AGAGAAAATGAACCACTCTTTTCCTTTGTATAATGTTGTTTTATTCTTCAGACAGAAGAGAGGA
GTTATACAGCTCTGCAGACATCCCATTCCTGTATGGGGACTGTGTTTGCCTCTTAGAGGTTCCC
AGGCCACTAGAGGAGATAAAGGGAAACAGATTGTTATAACTTGATATAATGATACTATAATAGA
TGTAACTACAAGGAGCTCCAGAAGCAAGAGAGAGGGAGGAACTTGGACTTCTCTGCATCTTTAG
TTGGAGTCCAAAGGCTTTTCAATGAAATTCTACTGCCCAGGGTACATTGATGCTGAAACCCCAT
TCAAATCTCCTGTTATATTCTAGAACAGGGAATTGATTTGGGAGAGCATCAGGAAGGTGGATGA
TCTGCCCAGTCACACTGTTAGTAAATTGTAGAGCCAGGACCTGAACTCTAATATAGTCATGTGT
TACTTAATGACGGGGACATGTTCTGAGAAATGCTTACACAAACCTAGGTGTTGTAGCCTACTAC
ACGCATAGGCTACATGGTATAGCCTATTGCTCCTAGACTACAAACCTGTACAGCCTGTTACTGT
ACTGAATACTGTGGGCAGTTGTAACACAATGGTAAGTATTTGTGTATCTAAACATAGAAGTTGC
AGTAAAAATATGCTATTTTAATCTTATGAGACCACTGTCATATATACAGTCCATCATTGACCAA
AACATCATATCAGCATTTTTTCTTCTAAGATTTTGGGAGCACCAAAGGGATACACTAACAGGAT
ATACTCTTTATAATGGGTTTGGAGAACTGTCTGCAGCTACTTCTTTTAAAAAGGTGATCTACAC
AGTAGAAATTAGACAAGTTTGGTAATGAGATCTGCAATCCAAATAAAATAAATTCATTGCTAAC
CTTTTTCTTTTCTTTTCAGGTTTGAAGATGCCGCATTTGGATTGGATGAATTCCAAATTCTGCT
TGCTTGCTTTTTAATATTGATATGCTTATACACTTACACTTTATGCACAAAATGTAGGGTTATA
ATAATGTTAACATGGACATGATCTTCTTTATAATTCTACTTTGAGTGCTGTCTCCATGTTTGAT
GTATCTGAGCAGGTTGCTCCACAGGTAGCTCTAGGAGGGCTGGCAACTTAGAGGTGGGGAGCAG
AGAATTCTCTTATCCAACATCAACATCTTGGTCAGATTTGAACTCTTCAATCTCTTGCACTCAA
AGCTTGTTAAGATAGTTAAGCGTGCATAAGTTAACTTCCAATTTACATACTCTGCTTAGAATTT
GGGGGAAAATTTAGAAATATAATTGACAGGATTATTGGAAATTTGTTATAATGAATGAAACATT
TTGTCATATAAGATTCATATTTACTTCTTATACATTTGATAAAGTAAGGCATGGTTGTGGTTAA
TCTGGTTTATTTTTGTTCCACAAGTTAAATAAATCATAAAACTTGATGTGTTATCTCTTATATC
TCACTCCCACTATTACCCCTTTATTTTCAAACAGGGAAACAGTCTTCAAGTTCCACTTGGTAAA
AAATGTGAACCCCTTGTATATAGAGTTTGGCTCACAGTGTAAAGGGCCTCAGTGATTCACATTT
TCCAGATTAGGAATCTGATGCTCAAAGAAGTTAAATGGCATAGTTGGGGTGACACAGCTGTCTA
GTGGGAGGCCAGCCTTCTATATTTTAGCCAGCGTTCTTTCCTGCGGGCCAGGTCATGAGGAGTA
TGCAGACTCTAAGAGGGAGCAAAAGTATCTGAAGGATTTAATATTTTAGCAAGGAATAGATATA
CAATCATCCCTTGGTCTCCCTGGGGGATTGGTTTCAGGACCCCTTCTTGGACACCAAATCTATG
GATATTTAAGTCCCTTCTATAAAATGGTATAGTATTTGCATATAACCTATCCACATCCTCCTGT
ATACTTTAAATCATTTCTAGATTACTTGTAATACCTAATACAATGTAAATGCTATGCAAATAGT
TGTTATTGTTTAAGGAATAATGACAAGAAAAAAAAGTCTGTACATGCTCAGTAAAGACACAACC
ATCCCTTTTTTTCCCCAGTGTTTTTGATCCATGGTTTGCTGAATCCACAGATGTGGAGCCCCTG
GATACGGAAGGCCCGCTGTACTTTGAATGACAAATAACAGATTTAAA.
>B2M (WT) nucleotide sequence
(SEQ ID NO: 432)
ATGAGCCGGAGCGTGGCTCTGGCCGTGCTGGCCCTATTGTCTCTGAGCGGACTGGAAGCCATCC
AGAGAACCCCAAAGATCCAAGTGTACAGCAGACACCCTGCCGAGAACGGCAAGAGCAATTTCCT
GAACTGCTACGTGTCCGGCTTTCACCCCAGCGACATCGAGGTGGATCTGCTGAAGAACGGCGAG
AGAATCGAGAAGGTCGAACACAGCGATCTGAGCTTCAGCAAGGATTGGTCCTTCTACCTGCTGT
ACTACACCGAGTTCACCCCTACAGAGAAGGACGAGTACGCCTGCAGAGTGAACCACGTGACCCT
GAGCCAGCCTAAGATCGTGAAGTGGGATAGAGATATG.
>B2M (K58E) nucleotide sequence
(SEQ ID NO: 433)
ATGAGCCGGAGCGTGGCTCTGGCCGTGCTGGCCCTATTGTCTCTGAGCGGACTGGAAGCCATCC
AGAGAACCCCAAAGATCCAAGTGTACAGCAGACACCCTGCCGAGAACGGCAAGAGCAATTTCCT
GAACTGCTACGTGTCCGGCTTTCACCCCAGCGACATCGAGGTGGATCTGCTGAAGAACGGCGAG
AGAATCGAGAAGGTCGAACACAGCGATCTGAGCTTCAGCGAAGATTGGTCCTTCTACCTGCTGT
ACTACACCGAGTTCACCCCTACAGAGAAGGACGAGTACGCCTGCAGAGTGAACCACGTGACCCT
GAGCCAGCCTAAGATCGTGAAGTGGGATAGAGATATG.
>B2M (K58E/W60G) nucleotide sequence
(SEQ ID NO: 434)
ATGAGCCGGAGCGTGGCTCTGGCCGTGCTGGCCCTATTGTCTCTGAGCGGACTGGAAGCCATCC
AGAGAACCCCAAAGATCCAAGTGTACAGCAGACACCCTGCCGAGAACGGCAAGAGCAATTTCCT
GAACTGCTACGTGTCCGGCTTTCACCCCAGCGACATCGAGGTGGATCTGCTGAAGAACGGCGAG
AGAATCGAGAAGGTCGAACACAGCGATCTGAGCTTCAGCAAGGATGGATCCTTCTACCTGCTGT
ACTACACCGAGTTCACCCCTACAGAGAAGGACGAGTACGCCTGCAGAGTGAACCACGTGACCCT
GAGCCAGCCTAAGATCGTGAAGTGGGATAGAGATATG.
>B2M (W60G) nucleotide sequence
(SEQ ID NO: 435)
ATGAGCCGGAGCGTGGCTCTGGCCGTGCTGGCCCTATTGTCTCTGAGCGGACTGGAAGCCATCC
AGAGAACCCCAAAGATCCAAGTGTACAGCAGACACCCTGCCGAGAACGGCAAGAGCAATTTCCT
GAACTGCTACGTGTCCGGCTTTCACCCCAGCGACATCGAGGTGGATCTGCTGAAGAACGGCGAG
AGAATCGAGAAGGTCGAACACAGCGATCTGAGCTTCAGCGAAGATGGATCCTTCTACCTGCTGT
ACTACACCGAGTTCACCCCTACAGAGAAGGACGAGTACGCCTGCAGAGTGAACCACGTGACCCT
GAGCCAGCCTAAGATCGTGAAGTGGGATAGAGATATG.

[0080] The term “base editor system” refers to an intermolecular complex for editing a nucleobase of a target nucleotide sequence. In various embodiments, the base editor (BE) system comprises (1) a polynucleotide programmable nucleotide binding domain, a deaminase domain (e.g., cytidine deaminase or adenosine deaminase) for deaminating nucleobases in the target nucleotide sequence; and (2) one or more guide polynucleotides (e.g., guide RNA) in conjunction with the polynucleotide programmable nucleotide binding domain. In various embodiments, the base editor (BE) system comprises a nucleobase editor domain selected from an adenosine deaminase or a cytidine deaminase, and a domain having nucleic acid sequence specific binding activity. In some embodiments, the base editor system comprises (1) a base editor (BE) comprising a polynucleotide programmable DNA binding domain and a deaminase domain for deaminating one or more nucleobases in a target nucleotide sequence; and (2) one or more guide RNAs in conjunction with the polynucleotide programmable DNA binding domain. In some embodiments, the polynucleotide programmable nucleotide binding domain is a polynucleotide programmable DNA binding domain. In some embodiments, the base editor is a cytidine base editor (CBE). In some embodiments, the base editor is an adenine or adenosine base editor (ABE). In some embodiments, the base editor is an adenine or adenosine base editor (ABE) or a cytidine or cytosine base editor (CBE). In some embodiments, the base editor system (e.g., a base editor system comprising a cytidine deaminase) comprises a uracil glycosylase inhibitor or other agent or peptide (e.g., a uracil stabilizing protein such as provided in WO2022015969, the disclosure of which is incorporated herein by reference in its entirety for all purposes) that inhibits the inosine base excision repair system.

[0081] The term “Cas9” or “Cas9 domain” refers to an RNA guided nuclease comprising a Cas9 protein, or a fragment thereof (e.g., a protein comprising an active, inactive, or partially active DNA cleavage domain of Cas9, and/or the gRNA binding domain of Cas9). A Cas9 nuclease is also referred to sometimes as a casnl nuclease or a CRISPR (clustered regularly interspaced short palindromic repeat) associated nuclease.

[0082] By “chimeric antigen receptor” or “CAR” is meant a synthetic or engineered receptor comprising an extracellular antigen binding domain joined to one or more intracellular signaling domains (e.g., T cell signaling domain), wherein the CAR confers specificity for an antigen bound by the antigen binding domain onto an immune effector cell. In some cases, the intracellular signaling domain is a T cell signaling domain. In embodiments, the immune effector cell is a T cell, an NK cell, or a macrophage. In embodiments, the CAR is a SUPRA CAR, an anti-tag CAR, a TCR-CAR, or a TCR-like CAR (see, e.g., Guedan, et al. “Engineering and Design of Chimeric Antigen Receptors,” Methods and Clinical Development, 12:145-156 (2019); Poorebrahim, et al., “TCR-like CARs and TCR-CARs targeting neoepitopes: an emerging potential,” Cancer Gene Therapy, 28:581-589 (2021); and Minutolo, et al. “The Emergence of Universal Immune Receptor T Cell Therapy for Cancer,” Front Oncol., 9:176 (2019), the disclosures of which are incorporated herein by reference in their entireties for all purposes).

[0083] By “chimeric antigen receptor (CAR) T cell” or “CAR-T cell” is meant a T cell expressing a CAR that has antigen specificity determined by the antibody-derived targeting domain of the CAR. As used herein, “CAR-T cells” includes T cells, regulatory T cells (TREG), or NK cells. As used herein, the term “CAR-T cells” includes cells engineered to express a CAR or a T cell receptor (TCR, sometimes referred to as TCR-CARs or TCR-like CARs). Methods of making CARs (e.g., for treatment of cancer) are publicly available (see, e.g., Park et al., Trends Biotechnol., 29:550-557, 2011; Grupp et al., N Engl J Med., 368:1509-1518, 2013; Han et al., J. Hematol Oncol. 6:47, 2013; Haso et al., (2013) Blood, 121, 1165-1174; Mohseni, et al., (2020) Front. Immunol., 11, art. 1608, doi: 10.3389/fimmu.2020.01608; Eggenhuizen, et al. Int. J. Mol. Sci. (2020), 21:7015, doi: 10.3390/ijms21197015; Poorebrahim, et al., Cancer Gene Ther 28, 581-589 (2021), doi.org/10.1038/s41417-021-00307-7, PCT Pubs. WO2012/079000, WO2013/059593; and U.S. Pub. 2012/0213783, the disclosure of each of which is incorporated herein by reference herein in its entirety). The term “conservative amino acid substitution” or “conservative mutation” refers to the replacement of one amino acid by another amino acid with a common property. A functional way to define common properties between individual amino acids is to analyze the normalized frequencies of amino acid changes between corresponding proteins of homologous organisms (Schulz, G. E. and Schirmer, R. H., Principles of Protein Structure, Springer-Verlag, New York (1979)). According to such analyses, groups of amino acids can be defined where amino acids within a group exchange preferentially with each other, and therefore resemble each other most in their impact on the overall protein structure (Schulz, G. E. and Schirmer, R. H., supra). Non-limiting examples of conservative mutations include amino acid substitutions of amino acids, for example, lysine for arginine and vice versa such that a positive charge can be maintained; glutamic acid for aspartic acid and vice versa such that a negative charge can be maintained; serine for threonine such that a free —OH can be maintained; and glutamine for asparagine such that a free —NH₂ can be maintained.

[0084] The term “conservative amino acid substitution” or “conservative mutation” refers to the replacement of one amino acid by another amino acid with a common property. A functional way to define common properties between individual amino acids is to analyze the normalized frequencies of amino acid changes between corresponding proteins of homologous organisms (Schulz, G. E. and Schirmer, R. H., Principles of Protein Structure, Springer-Verlag, New York (1979)). According to such analyses, groups of amino acids can be defined where amino acids within a group exchange preferentially with each other, and therefore resemble each other most in their impact on the overall protein structure (Schulz, G. E. and Schirmer, R. H., supra). Non-limiting examples of conservative mutations include amino acid substitutions of amino acids, for example, lysine for arginine and vice versa such that a positive charge can be maintained; glutamic acid for aspartic acid and vice versa such that a negative charge can be maintained; serine for threonine such that a free-OH can be maintained; and glutamine for asparagine such that a free —NH₂ can be maintained.

[0085] By “cluster of differentiation 4 (CD4) polypeptide” is meant a protein having at least about 85% amino acid sequence identity to GenBank accession No. AAB51309.1 (SEQ ID NO: 436), or a functional fragment thereof having immunomodulatory activity.

[0086] By “cluster of differentiation 4 (CD4) polynucleotide” is meant a nucleic acid molecule encoding a CD4 polypeptide, as well as the introns, exons, 3′ untranslated regions, 5′ untranslated regions, and regulatory sequences associated with its expression, or fragments thereof. An exemplary CD4 polynucleotide sequence is provided at Ensembl Accession No. ENSG00000010610.

[0087] By “cluster of differentiation 4 transmembrane (CD4TM) polypeptide” is meant a polypeptide with at least about 85% amino acid sequence identity to the amino acid sequence MALIVLGGVAGLLLFIGLGIFFCVRC (SEQ ID NO: 437), or a fragment thereof capable of anchoring a polypeptide linked thereto to a cell membrane.

[0088] By “CD4TM polynucleotide” is meant a nucleic acid molecule encoding a CD4TM polypeptide.

[0089] By “cluster of differentiation 47 (CD47) polypeptide” is meant a protein having at least about 85% amino acid sequence identity to NCBI Ref. Seq. accession No. NP_001768.1 (SEQ ID NO: 668), or a functional fragment thereof having immunomodulatory activity.

[0090] By “cluster of differentiation 47 (CD47) polynucleotide” is meant a nucleic acid molecule encoding a CD47 polypeptide, as well as the introns, exons, 3′ untranslated regions, 5′ untranslated regions, and regulatory sequences associated with its expression, or fragments thereof. An exemplary CD47 polynucleotide sequence is provided at Ensembl Accession No. ENSG00000196776.

[0091] The term “conservative amino acid substitution” or “conservative mutation” refers to the replacement of one amino acid by another amino acid with a common property. A functional way to define common properties between individual amino acids is to analyze the normalized frequencies of amino acid changes between corresponding proteins of homologous organisms (Schulz, G. E. and Schirmer, R. H., Principles of Protein Structure, Springer-Verlag, New York (1979)). According to such analyses, groups of amino acids can be defined where amino acids within a group exchange preferentially with each other, and therefore resemble each other most in their impact on the overall protein structure (Schulz, G. E. and Schirmer, R. H., supra). Non-limiting examples of conservative mutations include amino acid substitutions of amino acids, for example, lysine for arginine and vice versa such that a positive charge can be maintained; glutamic acid for aspartic acid and vice versa such that a negative charge can be maintained; serine for threonine such that a free —OH can be maintained; and glutamine for asparagine such that a free —NH₂ can be maintained.

[0092] The term “coding sequence” or “protein coding sequence” as used interchangeably herein refers to a segment of a polynucleotide that codes for a protein. Coding sequences can also be referred to as open reading frames. The region or sequence is bounded nearer the 5′ end by a start codon and nearer the 3′ end with a stop codon. Stop codons useful with the base editors described herein include the following: TAG, TAA, and TGA.

[0093] By “complex” is meant a combination of two or more molecules whose interaction relies on inter-molecular forces. Non-limiting examples of inter-molecular forces include covalent and non-covalent interactions. Non-limiting examples of non-covalent interactions include hydrogen bonding, ionic bonding, halogen bonding, hydrophobic bonding, van der Waals interactions (e.g., dipole-dipole interactions, dipole-induced dipole interactions, and London dispersion forces), and x-effects. In an embodiment, a complex comprises polypeptides, polynucleotides, or a combination of one or more polypeptides and one or more polynucleotides. In one embodiment, a complex comprises one or more polypeptides that associate to form a base editor (e.g., base editor comprising a nucleic acid programmable DNA binding protein, such as Cas9, and a deaminase) and a polynucleotide (e.g., a guide RNA). In an embodiment, the complex is held together by hydrogen bonds. It should be appreciated that one or more components of a base editor (e.g., a deaminase, or a nucleic acid programmable DNA binding protein) may associate covalently or non-covalently. As one example, a base editor may include a deaminase covalently linked to a nucleic acid programmable DNA binding protein (e.g., by a peptide bond). Alternatively, a base editor may include a deaminase and a nucleic acid programmable DNA binding protein that associate noncovalently (e.g., where one or more components of the base editor are supplied in trans and associate directly or via another molecule such as a protein or nucleic acid). In an embodiment, one or more components of the complex are held together by hydrogen bonds.

[0094] By “cytosine” or “4-Aminopyrimidin-2 (1H)-one” is meant a purine nucleobase with the molecular formula C₄H₅N₃O, having the structure

[chemical structure]

and corresponding to CAS No. 71-30-7.

[0095] By “cytidine” is meant a cytosine molecule attached to a ribose sugar via a glycosidic bond, having the structure

[chemical structure]

and corresponding to CAS No. 65-46-3. Its molecular formula is C₉H₁₃N₃O₅.

[0096] By “Cytidine Base Editor (CBE)” is meant a base editor comprising a cytidine deaminase.

[0097] By “Cytidine Base Editor (CBE) polynucleotide” is meant a polynucleotide encoding a CBE.

[0098] By “cytidine deaminase” or “cytosine deaminase” is meant a polypeptide or fragment thereof capable of deaminating cytidine or cytosine. In embodiments, the cytidine or cytosine is present in a polynucleotide. In one embodiment, the cytidine deaminase converts cytosine to uracil or 5-methylcytosine to thymine. The terms “cytidine deaminase” and “cytosine deaminase” are used interchangeably throughout the application. Petromyzon marinus cytosine deaminase 1 (PmCDA1) (SEQ ID NO: 13-14), Activation-induced cytidine deaminase (AICDA) (SEQ ID NOs: 15-21), and APOBEC (SEQ ID NOs: 12-61) are exemplary cytidine deaminases. Further exemplary cytidine deaminase (CDA) sequences are provided in the Sequence Listing as SEQ ID NOs: 62-66 and SEQ ID NOs: 67-189. Non-limiting examples of cytidine deaminases include those described in PCT/US20/16288, PCT/US2018/021878, 180802-021804/PCT, PCT/US2018/048969, and PCT/US2016/058344. By “cytosine deaminase activity” is meant catalyzing the deamination of cytosine or cytidine. In one embodiment, a polypeptide having cytosine deaminase activity converts an amino group to a carbonyl group. In an embodiment, a cytosine deaminase converts cytosine to uracil (i.e., C to U) or 5-methylcytosine to thymine (i.e., 5mC to T). In some embodiments, a cytosine deaminase as provided herein has increased cytosine deaminase activity (e.g., at least 10-fold, 20-fold, 30-fold, 40-fold, 50-fold, 60-fold, 70-fold, 80-fold, 90-fold, 100-fold or more) relative to a reference cytosine deaminase.

[0099] By “cytotoxic T lymphocyte-associated 4 (CTLA4) polypeptide” is meant a protein having at least about 85% amino acid sequence identity to NCBI Ref. Seq. accession No. NP_005205.2 (SEQ ID NO: 666), or a functional fragment thereof having immunomodulatory activity.

[0100] By “cytotoxic T lymphocyte-associated 4 (CTLA4) polynucleotide” is meant a nucleic acid molecule encoding a CTLA4 polypeptide, as well as the introns, exons, 3′ untranslated regions, 5′ untranslated regions, and regulatory sequences associated with its expression, or fragments thereof. An exemplary CTLA4 polynucleotide sequence is provided at Ensembl Accession No. ENSG00000163599.

[0101] The term “deaminase” or “deaminase domain,” as used herein, refers to a protein or fragment thereof that catalyzes a deamination reaction.

[0102] “Detect” refers to identifying the presence, absence or amount of the analyte to be detected. In one embodiment, a sequence alteration in a polynucleotide or polypeptide is detected. In another embodiment, the presence of indels is detected.

[0103] By “detectable label” is meant a composition that when linked to a molecule of interest renders the latter detectable, via spectroscopic, photochemical, biochemical, immunochemical, or chemical means. For example, useful labels include radioactive isotopes, magnetic beads, metallic beads, colloidal particles, fluorescent dyes, electron-dense reagents, enzymes (for example, as commonly used in an enzyme linked immunosorbent assay (ELISA)), biotin, digoxigenin, or haptens.

[0104] By “disease” is meant any condition or disorder that damages or interferes with the normal function of a cell, tissue, or organ. In some embodiments, the disease is a cancer (e.g., a hematological cancer or a solid tumor). In some instances, the disease is a disease that can be treated using the modified allogeneic T cells of the disclosure.

[0105] By “dual editing activity” or “dual deaminase activity” is meant having adenosine deaminase and cytidine deaminase activity. In one embodiment, a base editor having dual editing activity has both A→G and C→T activity, wherein the two activities are approximately equal or are within about 10% or 20% of each other. In another embodiment, a dual editor has A→G activity that no more than about 10% or 20% greater than C→T activity. In another embodiment, a dual editor has A→G activity that is no more than about 10% or 20% less than C→T activity. In some embodiments, the adenosine deaminase variant has predominantly cytosine deaminase activity, and little, if any, adenosine deaminase activity. In some embodiments, the adenosine deaminase variant has cytosine deaminase activity, and no significant or no detectable adenosine deaminase activity.

[0106] By “effective amount” is meant the amount of an agent or active compound that is required to ameliorate the symptoms of a disease relative to an untreated patient or an individual without disease. In an embodiment, the agent is a CAR-T cell described herein (e.g., a CAR-T cell expressing a beta-2 microglobulin fused to an HLA-A, -B, or -C). The effective amount of active compound(s) or agent used to practice the present disclosure for therapeutic treatment of a disease varies depending upon the manner of administration, the age, body weight, and general health of the subject. Ultimately, the attending physician or veterinarian will decide the appropriate amount and dosage regimen. Such amount is referred to as an “effective” amount. In one embodiment, an effective amount is the amount of a base editor of the disclosure sufficient to introduce an alteration in a gene of interest in a cell (e.g., a cell in vitro or in vivo). In one embodiment, an effective amount is the amount of a base editor required to achieve a therapeutic effect. Such therapeutic effect need not be sufficient to alter a pathogenic gene in all cells of a subject, tissue, or organ, but only to alter the pathogenic gene in about 1%, 5%, 10%, 25%, 50%, 75% or more of the cells present in a subject, tissue, or organ. In one embodiment, an effective amount is sufficient to ameliorate one or more symptoms of a disease.

[0107] The term “exonuclease” refers to a protein or polypeptide capable of removing successive nucleotides from either the 5′ or 3′ end of a polynucleotide.

[0108] The term “endonuclease” refers to a protein or polypeptide capable of catalyzing the cleavage of internal regions in a polynucleotide.

[0109] By “fragment” is meant a portion of a polypeptide or nucleic acid molecule. This portion contains, at least about 10%, 20%, 30%, 40%, 50%, 60%, 70%, 80%, or 90% of the entire length of the reference nucleic acid molecule or polypeptide. A fragment may contain 10, 20, 30, 40, 50, 60, 70, 80, 90, or 100, 200, 300, 400, 500, 600, 700, 800, 900, or 1000 nucleotides or amino acids. In some embodiments, the fragment is a functional fragment.

[0110] In general, a “gene” is a region on the genome that is capable of being transcribed to an RNA that either has a regulatory function, a catalytic function, and/or encodes a protein. An eukaryotic gene typically has introns and exons, which may organize to produce different RNA splice variants that encode alternative versions of a mature protein. The skilled artisan will appreciate that the present disclosure encompasses all transcripts encoding a polypeptide of interest, including splice variants, allelic variants and transcripts that occur because of alternative promoter sites or alternative poly-adenylation sites. A “full-length” gene or RNA therefore encompasses any naturally occurring splice variants, allelic variants, other alternative transcripts, splice variants generated by recombinant technologies which bear the same function as the naturally occurring variants, and the resulting RNA molecules. In some embodiments, the fragment is a functional fragment.

[0111] “Graft versus host disease” (GVHD) refers to a pathological condition where transplanted cells of a donor generate an immune response against cells of the host.

[0112] By “guide polynucleotide” is meant a polynucleotide or polynucleotide complex that is specific for a target sequence and can form a complex with a polynucleotide programmable nucleotide binding domain protein (e.g., Cas9 or Cpf1). In an embodiment, the guide polynucleotide is a guide RNA (gRNA). gRNAs can exist as a complex of two or more RNAs, or as a single RNA molecule.

[0113] By “granzyme B (GZMB) polypeptide” is meant a protein having at least about 85% amino acid sequence identity to GenBank accession No. AAA75490.1 (SEQ ID NO: 438), or a functional fragment thereof having immunomodulatory activity.

[0114] By “granzyme B (GZMB) polynucleotide” is meant a nucleic acid molecule encoding an GZMB polypeptide, as well as the introns, exons, 3′ untranslated regions, 5′ untranslated regions, and regulatory sequences associated with its expression, or fragments thereof. An exemplary human GZMB polynucleotide sequence is provided at Ensembl Accession No. ENSG00000100453.

[0115] By “heterologous,” or “exogenous” is meant a polynucleotide or polypeptide that 1) has been experimentally incorporated to a polynucleotide or polypeptide sequence to which the polynucleotide or polypeptide is not normally found in nature; or 2) has been experimentally placed into a cell that does not normally comprise the polynucleotide or polypeptide. In some embodiments, “heterologous” means that a polynucleotide or polypeptide has been experimentally placed into a non-native context. In some embodiments, a heterologous polynucleotide or polypeptide is derived from a first species or host organism, and is incorporated into a polynucleotide or polypeptide derived from a second species or host organism. In some embodiments, the first species or host organism is different from the second species or host organism. In some embodiments the heterologous polynucleotide is DNA. In some embodiments the heterologous polynucleotide is RNA. “Hybridization” means hydrogen bonding, which may be Watson-Crick, Hoogsteen or reversed Hoogsteen hydrogen bonding, between complementary nucleobases. For example, adenine and thymine are complementary nucleobases that pair through the formation of hydrogen bonds.

[0116] “Host versus graft disease” (HVGD) refers to a pathological condition where the immune system of a host generates an immune response against transplanted cells of a donor.

[0117] By “Human Leukocyte Antigen-E (HLA-E) polypeptide” is meant a protein having at least about 85% amino acid sequence identity to NCBI Accession No. NP_005507.3 (SEQ ID NO: 629), or a fragment thereof having immunomodulatory activity.

[0118] By “Human Leukocyte Antigen-E (HLA-E) polynucleotide” is meant a nucleic acid molecule encoding an HLA-E polypeptide, as well as the introns, exons, 3′ untranslated regions, 5′ untranslated regions, and regulatory sequences associated with its expression, or fragments thereof. An exemplary HLA-E polynucleotide is provided at NCBI Accession No. NM_005516.6 (SEQ ID NO: 630). The HLA-E gene corresponds to Ensembl: ENSG00000116815.

[0119] By “interferon gamma (IFN-G) polypeptide” is meant a protein having at least about 85% amino acid sequence identity to GenBank accession No. CAA44325.1 (SEQ ID NO: 439), or a functional fragment thereof having immunomodulatory activity.

[0120] By “interferon gamma (IFN-G) polynucleotide” is meant a nucleic acid molecule encoding an IFN-G polypeptide, as well as the introns, exons, 3′ untranslated regions, 5′ untranslated regions, and regulatory sequences associated with its expression, or fragments thereof. An exemplary human IFN-G polynucleotide sequence is provided at Ensembl Accession No. ENSG00000111537.

[0121] By “major histocompatibility complex, class I, A (HLA-A) polypeptide” is meant an HLA class-I heavy chain polypeptide having at least about 85% amino acid sequence identity to GenBank Accession No. BAA07530.1, to HLA-A*02, and/or to HLA-A*03, which are provided below, or a fragment thereof having antigen presenting activity. In embodiments, the HLA-A polypeptide contains an amino acid alteration at one or more positions selected from D227, T228, and A245 (e.g., a D227K, T228A, and/or A245V alteration), or a corresponding position(s), where the positions are numbered relative to the “HLA-A*02” or “HLA-A*03” sequence provided below. In some cases, the HLA-A polypeptide contains one or more amino acid alterations within the alpha-3 domain (e.g., positions 183-274 numbered relative to the “HLA-A*02” or “HLA-A*03” sequence provided below, or corresponding positions).

>BAA07530.1 HLA-A [Homo sapiens] (signal peptide is in bold)
(SEQ ID NO: 440)
[sequence omitted]
>HLA-A*02 (HLA-A2)
(SEQ ID NO: 441)
GSHSMRYFFTSVSRPGRGEPRFIAVGYVDDTQFVRFDSDAASQRMEPRAPWIEQEGPEYWDGET
RKVKAHSQTHRVDLGTLRGYYNQSEAGSHTVQRMYGCDVGSDWRFLRGYHQYAYDGKDYIALKE
DLRSWTAADMAAQTTKHKWEAAHVAEQLRAYLEGTCVEWLRRYLENGKETLQRTDAPKTHMTHH
AVSDHEATLRCWALSFYPAEITLTWQRDGEDQTQDTELVETRPAGDGTFQKWAAVVVPSGQEQR
YTCHVQHEGLPKPLTLRWEPSSQPTIPIVGIIAGLVLFGAVITGAVVAAVMWRRKSSDRKGGSY
SQAASSDSAQGSDVSLTACKV.
>HLA-A*03
(SEQ ID NO: 442)
GSHSMRYFFTSVSRPGRGEPRFIAVGYVDDTQFVRFDSDAASQRMEPRAPWIEQEGPEYWDQET
RNVKAQSQTDRVDLGTLRGYYNQSEAGSHTIQIMYGCDVGSDGRFLRGYRQDAYDGKDYIALNE
DLRSWTAADMAAQITKRKWEAAHEAEQLRAYLDGTCVEWLRRYLENGKETLQRTDPPKTHMTHH
PISDHEATLRCWALGFYPAEITLTWQRDGEDQTQDTELVETRPAGDGTFQKWAAVVVPSGEEQR
YTCHVQHEGLPKPLTLRWELSSQPTIPIVGIIAGLVLLGAVITGAVVAAVMWRRKSSDRKGGSY
TQAASSDSAQGSDVSLTACKV.

[0122] By “major histocompatibility complex, class I, A (HLA-A) polynucleotide” is meant a nucleic acid molecule encoding an HLA-A polypeptide, as well as the introns, exons, 3′ untranslated regions, 5′ untranslated regions, and regulatory sequences associated with its expression, or fragments thereof. An exemplary HLA-A polynucleotide sequence is provided at Genbank Accession No. D38525.1, which is provided below.

>D38525.1:1-843 Homo sapiens HLA-A mRNA, complete cds, HLA-A null allele HLA-A*0215N ATGGCCGTCATGGCGCCCCGAACCCTCGTCCTGCTACTCTCGGGGGCTCTGGCCCTGACCCAGA CCTGGGCGGGCTCTCACTCCATGAGGTATTTCTTCACATCCGTGTCCCGGCCCGGCCGCGGGGA GCCCCGCTTCATCGCAGTGGGCTACGTGGACGACACGCAGTTCGTGCGGTTCGACAGCGACGCC GCGAGCCAGAGGATGGAGCCGCGGGCGCCGTGGATAGAGCAGGAGGGTCCGGAGTATTGGGACG GGGAGACACGGAAAGTGAAGGCCCACTCACAGACTCACCGAGTGGACCTGGGGACCCTGCGCGG CTACTACAACCAGAGCGAGGCCGGTTCTCACACCGTCCAGAGGATGTGTGGCTGCGACGTGGGG TCGGACTGGCGCTTCCTCCGCGGGTACCACCAGTACGCCTACGACGGCAAGGATTACATCGCCC TGAAAGAGGACCTGCGCTCTTGGACCGCGGCGGACATGGCAGCTCAGACCACCAAGCACAAGTG GGAGGCGGCCCATGTGGCGGAGCAGTTGAGAGCCTACCTGGAGGGCACGTGCGTGGAGTGGCTC CGCAGATACCTGGAGAACGGGAAGGAGACGCTGCAGCGCACGGACGCCCCCAAAACGCATATGA CTCACCACGCTGTCTCTGACCATGAAGCCACCCTGAGGTGCTGGGCCCTGAGCTTCTACCCTGC GGAGATCACACTGACCTGGCAGCGGGATGGGGAGGACCAGACCCAGGACACGGAGCTCGTGGAG ACCAGGCCTGCAGGGGATGGAACCTTCCAGAAGTGGGCGGCTGTGGTGGTGCCTTCTGGACAGG AGCAGAGATAA (SEQ ID NO: 443). The HLA-A gene corresponds to Ensemble ENSG00000206503.

[0123] By “major histocompatibility complex, class I, B (HLA-B) polypeptide” is meant an HLA class-I heavy chain polypeptide having at least about 85% amino acid sequence identity to GenBank Accession No. CAD30340.1, to HLA-B*57, and/or to HLA-B*44, which are provided below, or a fragment thereof having antigen presenting activity. In embodiments, the HLA-B polypeptide contains an amino acid alteration at one or more positions selected from D227, T228, and A245 (e.g., a D227K, T228A, and/or A245V alteration), or a corresponding position(s), where the positions are numbered relative to the “HLA-B*57” or “HLA-B*44” sequence provided below. In some cases, the HLA-B polypeptide contains one or more amino acid alterations within the alpha-3 domain (e.g., positions 183-274 numbered relative to the e “HLA-B*57” or “HLA-B*44” sequence provided below, or corresponding positions in another HLA-B polypeptide).

>CAD30340.1 HLA-B [Homo sapiens]
(SEQ ID NO: 444)
[sequence omitted]
>HLA-B*57
(SEQ ID NO: 445)
GSHSMRYFYTAMSRPGRGEPRFIAVGYVDDTQFVRFDSDAASPRMAPRAPWIEQEGPEYWDGET
RNMKASAQTYRENLRIALRYYNQSEAGSHIIQVMYGCDVGPDGRLLRGHDQSAYDGKDYIALNE
DLSSWTAADTAAQITQRKWEAARVAEQLRAYLEGLCVEWLRRYLENGKETLQRADPPKTHVTHH
PISDHEATLRCWALGFYPAEITLTWQRDGEDQTQDTELVETRPAGDRTFQKWAAVVVPSGEEQR
YTCHVQHEGLPKPLTLRWEPSSQSTVPIVGIVAGLAVLAVVVIGAVVAAVMCRRKSSGGKGGSY
SQAACSDSAQGSDVSLTA.
>HLA-B*44
(SEQ ID NO: 446)
GSHSMRYFYTAMSRPGRGEPRFITVGYVDDTLFVRFDSDATSPRKEPRAPWIEQEGPEYWDRET
QISKTNTQTYRENLRTALRYYNQSEAGSHIIQRMYGCDVGPDGRLLRGYDQDAYDGKDYIALNE
DLSSWTAADTAAQITQRKWEAARVAEQDRAYLEGLCVESLRRYLENGKETLQRADPPKTHVTHH
PISDHEVTLRCWALGFYPAEITLTWQRDGEDQTQDTELVETRPAGDRTFQKWAAVVVPSGEEQR
YTCHVQHEGLPKPLTLRWEPSSQSTVPIVGIVAGLAVLAVVVIGAVVAAVMCRRKSSGGKGGSY
SQAACSDSAQGSDVSLTA

[0124] By “major histocompatibility complex, class I, B (HLA-B) polynucleotide” is meant a nucleic acid molecule encoding an HLA-B polypeptide, as well as the introns, exons, 3′ untranslated regions, 5′ untranslated regions, and regulatory sequences associated with its expression, or fragments thereof. An exemplary HLA-B polynucleotide sequence is provided at Genbank Accession No. AJ458992.1, which is provided below.

>AJ458992.1:302-374,503-772, 1023-1298, 1872-2147,2252-2368,2810-2842,2949-2992 Homo sapiens HLA-B gene for MHC class I antigen, HLA-B*4501 allele, exons 1-7

(SEQ ID NO: 447)
ATGCGGGTCACGGCACCCCGAACCGTCCTCCTGCTGCTCTCGGCG
GCCCTGGCCCTGACCGAGACCTGGGCCGGCTCCCACTCCATGAGG
TATTTCCACACCGCCATGTCCCGGCCCGGCCGCGGGGAGCCCCGC
TTCATCACCGTGGGCTACGTGGACGACACGCTGTTCGTGAGGTTC
GACAGCGACGCCACGAGTCCGAGGAAGGAGCCGCGGGCGCCATGG
ATAGAGCAGGAGGGGCCGGAGTATTGGGACCGGGAGACACAGATC
TCCAAGACCAACACACAGACTTACCGAGAGAGCCTGCGGAACCTG
CGCGGCTACTACAACCAGAGCGAGGCCGGGTCTCACACTTGGCAG
AGGATGTATGGCTGCGACCTGGGGCCCGACGGGCGCCTCCTCCGC
GGGTATAACCAGTTAGCCTACGACGGCAAGGATTACATCGCCCTG
AACGAGGACCTGAGCTCCTGGACCGCGGCGGACACCGCGGCTCAG
ATCACCCAGCGCAAGTGGGAGGCGGCCCGTGTGGCGGAGCAGGAC
AGAGCCTACCTGGAGGGCCTGTGCGTGGAGTCGCTCCGCAGATAC
CTGGAGAACGGGAAGGAGACGCTGCAGCGCGCGGACCCCCCAAAG
ACACATGTGACCCACCACCCCATCTCTGACCATGAGGCCACCCTG
AGGTGCTGGGCCCTGGGCTTCTACCCTGCGGAGATCACACTGACC
TGGCAGCGGGATGGCGAGGACCAAACTCAGGACACCGAGCTTGTG
GAGACCAGACCAGCAGGAGATAGAACCTTCCAGAAGTGGGCAGCT
GTGGTGGTGCCTTCTGGAGAAGAGCAGAGATACACATGCCATGTA
CAGCATGAGGGGCTGCCGAAGCCCCTCACCCTGAGATGGGAGCCA
TCTTCCCAGTCCACCATCCCCATCGTGGGCATTGTTGCTGGCCTG
GCTGTCCTAGCAGTTGTGGTCATCGGAGCTGTGGTCGCTACTGTG
ATGTGTAGGAGGAAGAGCTCAGGTGGAAAAGGAGGGAGCTACTCT
CAGGCTGCGTCCAGCGACAGTGCCCAGGGCTCTGATGTGTCTCTC
ACAGCTTGA.

[0125] By “major histocompatibility complex, class I, C (HLA-C) polypeptide” is meant an HLA class-I heavy chain polypeptide having at least about 85% amino acid sequence identity to GenBank Accession No. BBO94058.1, to HLA-C*04, HLA-C*05, and/or to HLA-C*07, which are provided below, or a fragment thereof having antigen presenting activity. In embodiments, the HLA-C polypeptide contains an amino acid alteration at one or more positions selected from C1, D227, T228, and A245 (e.g., a CIG, A73T, D227K, T228A, and/or A245V alteration), or a corresponding position(s), where the positions are numbered relative to the “HLA-C*04,” “HLA-C*05”, or “HLA-C*07” sequence provided below. In some cases, the HLA-C polypeptide contains one or more amino acid alterations within the alpha-3 domain (e.g., positions 183-274 numbered relative to the “HLA-C*04,” “HLA-C*05”, or “HLA-C*07” sequence provided below, or corresponding positions in another HLA-C polypeptide).

>BB094058.1 MHC class I antigen, HLA-C alpha chain [Homo sapiens]
(SEQ ID NO: 448)
[sequence omitted]
>HLA-C*04
(SEQ ID NO: 449)
GSHSMRYFSTSVSWPGRGEPRFIAVGYVDDTQFVRFDSDAASPRGEPREPWVEQEGPEYWDRET
QKYKRQAQADRVNLRKLRGYYNQSEDGSHTLQRMFGCDLGPDGRLLRGYNQFAYDGKDYIALNE
DLRSWTAADTAAQITQRKWEAAREAEQRRAYLEGTCVEWLRRYLENGKETLQRAEHPKTHVTHH
PVSDHEATLRCWALGFYPAEITLTWQWDGEDQTQDTELVETRPAGDGTFQKWAAVVVPSGEEQR
YTCHVQHEGLPEPLTLRWKPSSQPTIPIVGIVAGLAVLAVLAVLGAMVAVVMCRRKSSGGKGGS
CSQAASSNSAQGSDESLIACKA.
>HLA-C*05
(SEQ ID NO: 450)
CSHSMRYFYTAVSRPGRGEPRFIAVGYVDDTQFVQFDSDAASPRGEPRAPWVEQEGPEYWDRET
QKYKRQAQTDRVNLRKLRGYYNQSEAGSHTLQRMYGCDLGPDGRLLRGYNQFAYDGKDYIALNE
DLRSWTAADKAAQITQRKWEAAREAEQRRAYLEGTCVEWLRRYLENGKKTLQRAEHPKTHVTHH
PVSDHEATLRCWALGFYPAEITLTWQRDGEDQTQDTELVETRPAGDGTFQKWAAVVVPSGEEQR
YTCHVQHEGLPEPLTLRWGPSSQPTIPIVGIVAGLAVLAVLAVLGAVMAVVMCRRKSSGGKGGS
CSQAASSNSAQGSDESLIACKA.
>HLA-C*07
(SEQ ID NO: 451)
CSHSMRYFDTAVSRPGRGEPRFISVGYVDDTQFVRFDSDAASPRGEPRAPWVEQEGPEYWDRET
QKYKRQAQADRVSLRNLRGYYNQSEDGSHTLQRMSGCDLGPDGRLLRGYDQSAYDGKDYIALNE
DLRSWTAADTAAQITQRKLEAARAAEQLRAYLEGTCVEWLRRYLENGKETLQRAEPPKTHVTHH
PLSDHEATLRCWALGFYPAEITLTWQRDGEDQTQDTELVETRPAGDGTFQKWAAVVVPSGQEQR
YTCHMQHEGLQEPLTLSWEPSSQPTIPIMGIVAGLAVLVVLAVLGAVVTAMMCRRKSSGGKGGS
CSQAACSNSAQGSDESLITCKA.

[0126] By “major histocompatibility complex, class I, C (HLA-C) polynucleotide” is meant a nucleic acid molecule encoding an HLA-C polypeptide, as well as the introns, exons, 3′ untranslated regions, 5′ untranslated regions, and regulatory sequences associated with its expression, or fragments thereof. An exemplary HLA-C polynucleotide sequence is provided at Genbank Accession No. LC508210.1, which is provided below.

>LC508210.1:1-73,204-473,720-995,1583-1858,1980-2099,2539-2571,2679-2726,2891-2895 Homo sapiens HLA-C gene for MHC class I antigen, HLA-C alpha chain, complete cds, HLA-C*12:02:02:01 variant

(SEQ ID NO: 452)
ATGCGGGTCATGGCGCCCCGAACCCTCATCCTGCTGCTCTCGGGA
GCCCTGGCCCTGACCGAGACCTGGGCCTGCTCCCACTCCATGAGG
TATTTCTACACCGCCGTGTCCCGGCCCGGCCGCGGAGAGCCCCGC
TTCATCGCAGTGGGCTACGTGGACGACACGCAGTTCGTGCGGTTC
GACAGCGACGCCGCGAGTCCAAGAGGGGAGCCGCGGGCGCCGTGG
GTGGAGCAGGAGGGGCCGGAGTATTGGGACCGGGAGACACAGAAG
TACAAGCGCCAGGCACAGGCTGACCGAGTGAGCCTGCGGAACCTG
CGCGGCTACTACAACCAGAGCGAGGCCGGGTCTCACACCCTCCAG
AGGATGTACGGCTGCGACCTGGGGCCCGACGGGCGCCTCCTCCGC
GGGTATGACCAGTCCGCCTACGACGGCAAGGATTACATCGCCCTG
AACGAGGACCTGCGCTCCTGGACCGCTGCGGACACGGCGGCTCAG
ATCACCCAGCGCAAGTGGGAGGCGGCCCGTGAGGCGGAGCAGTGG
AGAGCCTACCTGGAGGGCACGTGCGTGGAGTGGCTCCGCAGATAC
CTGGAGAACGGGAAGGAGACGCTGCAGCGCGCGGAACACCCAAAG
ACACACGTGACCCACCATCCCGTCTCTGACCATGAGGCCACCCTG
AGGTGCTGGGCCCTGGGCTTCTACCCTGCGGAGATCACACTGACC
TGGCAGCGGGATGGCGAGGACCAAACTCAGGACACCGAGCTTGTG
GAGACCAGGCCAGCAGGAGATGGAACCTTCCAGAAGTGGGCAGCT
GTGGTGGTGCCTTCTGGAGAAGAGCAGAGATACACGTGCCATGTG
CAGCACGAGGGGCTGCCAGAGCCCCTCACCCTGAGATGGGAGCCA
TCTTCCCAGCCCACCATCCCCATCATGGGCATCGTTGCTGGCCTG
GCTGTCCTGGCTGTCCTAGCTGTCCTAGGAGCTGTGATGGCTGTT
GTGATGTGTAGGAGGAAGAGCTCAGGTGGAAAAGGAGGGAGCTGC
TCTCAGGCTGCGTCCAGCAACAGTGCCCAGGGCTCTGATGAGTCT
CTCATCGCTTGTAAAGCCTGA.

[0127] By “immune cell” is meant a cell of the immune system capable of generating an immune response. Exemplary immune cell include, but are not limited to, T cells, NK cells, B cells, or hematopoietic stem cells.

[0128] By “immune effector cell” is meant a lymphocyte, once activated, capable of effecting an immune response upon a target cell. In some embodiments, immune effector cells are effector T cells. In some embodiments, the effector T cell is a naïve CD8⁺ T cell, a cytotoxic T cell, a natural killer T (NKT) cell, a natural killer (NK) cell, or a regulatory T (Treg) cell. In some embodiments, immune effector cells are effector NK cells. In some embodiments, the effector T cells are thymocytes, immature T lymphocytes, mature T lymphocytes, resting T lymphocytes, or activated T lymphocytes. In some embodiments the immune effector cell is a CD4⁺ CD8⁺ T cell or a CD4⁻ CD8⁻ T cell. In some embodiments the immune effector cell is a T helper cell. In some embodiments the T helper cell is a T helper 1 (Th1), a T helper 2 (Th2) cell, or a helper T cell expressing CD4 (CD4⁺ T cell).

[0129] By “immunomodulatory activity” is meant increasing, decreasing, or sustaining an immune response. In embodiments, the reduction in immune response is at least about 5%, 10%, 10%, 25%, 50%, 75%, 80%, 90%, 95% or 100%. In embodiments, a reduction in immune response is measured by detecting the expression, levels, or activity of granzyme B (GZMB), IFN-gamma, and TNF-alpha. In other embodiments, a reduction in immune response is measured by detecting a reduction in the killing of a target cell (e.g., modified immune cell) by an effector cell (e.g., CAR-T cell, T cell, NK cell).

[0130] By “increases” is meant a positive alteration of at least 10%, 25%, 50%, 75%, or 100%, or about 1.5 fold, about 2 fold, about 3-fold, about 4-fold, about 5-fold, about 6-fold, about 7-fold, about 8-fold, about 9-fold, about 10-fold, about 15-fold, about 20-fold, about 25-fold, about 30-fold, about 35-fold, about 40-fold, about 45-fold, about 50-fold, or about 100-fold.

[0131] The terms “inhibitor of base repair”, “base repair inhibitor”, “IBR” or their grammatical equivalents refer to a protein that is capable in inhibiting the activity of a nucleic acid repair enzyme, for example a base excision repair enzyme.

[0132] An “intein” is a fragment of a protein that is able to excise itself and join the remaining fragments (the exteins) with a peptide bond in a process known as protein splicing.

[0133] By “programmed cell death ligand 1 (PD-L1) polypeptide” is meant a protein having at least about 85% amino acid sequence identity to GenBank accession No. AAP13470.1 (SEQ ID NO: 667), or a functional fragment thereof having immunomodulatory activity.

[0134] By “programmed cell death ligand 1 (PD-L1) polynucleotide” is meant a nucleic acid molecule encoding a PD-L1 polypeptide, as well as the introns, exons, 3′ untranslated regions, 5′ untranslated regions, and regulatory sequences associated with its expression, or fragments thereof. An exemplary PD-L1 polynucleotide sequence is provided at Ensembl Accession No. ENSG00000120217.

[0135] The terms “isolated,” “purified,” or “biologically pure” refer to material that is free to varying degrees from components which normally accompany it as found in its native state. “Isolate” denotes a degree of separation from original source or surroundings. “Purify” denotes a degree of separation that is higher than isolation. A “purified” or “biologically pure” protein is sufficiently free of other materials such that any impurities do not materially affect the biological properties of the protein or cause other adverse consequences. That is, a nucleic acid or peptide of this disclosure is purified if it is substantially free of cellular material, viral material, or culture medium when produced by recombinant DNA techniques, or chemical precursors or other chemicals when chemically synthesized. Purity and homogeneity are typically determined using analytical chemistry techniques, for example, polyacrylamide gel electrophoresis or high performance liquid chromatography. The term “purified” can denote that a nucleic acid or protein gives rise to essentially one band in an electrophoretic gel. For a protein that can be subjected to modifications, for example, phosphorylation or glycosylation, different modifications may give rise to different isolated proteins, which can be separately purified.

[0136] By “isolated polynucleotide” is meant a nucleic acid molecule that is free of the genes which, in the naturally-occurring genome of the organism from which the nucleic acid molecule of the disclosure is derived, flank the gene. The term therefore includes, for example, a recombinant DNA that is incorporated into a vector; into an autonomously replicating plasmid or virus; or into the genomic DNA of a prokaryote or eukaryote; or that exists as a separate molecule (for example, a cDNA or a genomic or cDNA fragment produced by PCR or restriction endonuclease digestion) independent of other sequences. In addition, the term includes an RNA molecule that is transcribed from a DNA molecule, as well as a recombinant DNA that is part of a hybrid gene encoding additional polypeptide sequence.

[0137] By an “isolated polypeptide” is meant a polypeptide of the disclosure that has been separated from components that naturally accompany it. Typically, the polypeptide is isolated when it is at least 60%, by weight, free from the proteins and naturally-occurring organic molecules with which it is naturally associated. In some embodiments, the preparation is at least 75%, at least 90%, or at least 99%, by weight, a polypeptide of the disclosure. An isolated polypeptide of the disclosure may be obtained, for example, by extraction from a natural source, by expression of a recombinant nucleic acid encoding such a polypeptide; or by chemically synthesizing the protein. Purity can be measured by any appropriate method, for example, column chromatography, polyacrylamide gel electrophoresis, or by HPLC analysis.

[0138] The term “linker”, as used herein, refers to a molecule that links two moieties. In one embodiment, the term “linker” refers to a covalent linker (e.g., covalent bond) or a non-covalent linker.

[0139] By “marker” is meant any protein, polynucleotide, or other analyte having an alteration in expression, level, structure, or activity that is associated with a disease or disorder.

[0140] The term “mutation,” as used herein, refers to a substitution of a residue within a sequence, e.g., a nucleic acid or amino acid sequence, with another residue, or a deletion or insertion of one or more residues within a sequence. Mutations are typically described herein by identifying the original residue followed by the position of the residue within the sequence and by the identity of the newly substituted residue. Various methods for making the amino acid substitutions (mutations) provided herein are well known in the art, and are provided by, for example, Green and Sambrook, Molecular Cloning: A Laboratory Manual (4^{th} ed., Cold Spring Harbor Laboratory Press, Cold Spring Harbor, N.Y. (2012)).

[0141] The terms “nucleic acid” and “nucleic acid molecule,” as used herein, refer to a compound comprising a nucleobase and an acidic moiety, e.g., a nucleoside, a nucleotide, or a polymer of nucleotides. Typically, polymeric nucleic acids, e.g., nucleic acid molecules comprising three or more nucleotides are linear molecules, in which adjacent nucleotides are linked to each other via a phosphodiester linkage. In some embodiments, “nucleic acid” refers to individual nucleic acid residues (e.g., nucleotides and/or nucleosides). In some embodiments, “nucleic acid” refers to an oligonucleotide chain comprising three or more individual nucleotide residues. As used herein, the terms “oligonucleotide” and “polynucleotide” can be used interchangeably to refer to a polymer of nucleotides (e.g., a string of at least three nucleotides). In some embodiments, “nucleic acid” encompasses RNA as well as single and/or double-stranded DNA. Nucleic acids may be naturally occurring, for example, in the context of a genome, a transcript, an mRNA, tRNA, IRNA, siRNA, snRNA, a plasmid, cosmid, chromosome, chromatid, or other naturally occurring nucleic acid molecule. On the other hand, a nucleic acid molecule may be a non-naturally occurring molecule, e.g., a recombinant DNA or RNA, an artificial chromosome, an engineered genome, or fragment thereof, or a synthetic DNA, RNA, DNA/RNA hybrid, or including non-naturally occurring nucleotides or nucleosides. Furthermore, the terms “nucleic acid,” “DNA,” “RNA,” and/or similar terms include nucleic acid analogs, e.g., analogs having other than a phosphodiester backbone. Nucleic acids can be purified from natural sources, produced using recombinant expression systems and optionally purified, chemically synthesized, etc. Where appropriate, e.g., in the case of chemically synthesized molecules, nucleic acids comprise nucleoside analogs such as analogs having chemically modified bases or sugars, and backbone modifications. A nucleic acid sequence is presented in the 5′ to 3′ direction unless otherwise indicated. In some embodiments, a nucleic acid is or comprises natural nucleosides (e.g. adenosine, thymidine, guanosine, cytidine, uridine, deoxyadenosine, deoxythymidine, deoxyguanosine, and deoxycytidine); nucleoside analogs (e.g., 2-aminoadenosine, 2-thiothymidine, inosine, pyrrolo-pyrimidine, 3-methyl adenosine, 5-methylcytidine, 2-aminoadenosine, C5-bromouridine, C5-fluorouridine, C5-iodouridine, C5-propynyl-uridine, C5-propynyl-cytidine, C5-methylcytidine, 2-aminoadenosine, 7-deazaadenosine, 7-deazaguanosine, 8-oxoadenosine, 8-oxoguanosine, O (6)-methylguanine, and 2-thiocytidine); chemically modified bases; biologically modified bases (e.g., methylated bases); intercalated bases; modified sugars (e.g., 2′-fluororibose, ribose, 2′-deoxyribose, arabinose, and hexose); and/or modified phosphate groups (e.g., phosphorothioates and 5′-N-phosphoramidite linkages).

[0142] The term “nuclear localization sequence,” “nuclear localization signal,” or “NLS” refers to an amino acid sequence that promotes import of a protein into the cell nucleus. Nuclear localization sequences are known in the art and described, for example, in Plank et al., International PCT application, PCT/EP2000/011690, filed Nov. 23, 2000, published as WO/2001/038547 on May 31, 2001, the contents of which are incorporated herein by reference for their disclosure of exemplary nuclear localization sequences. In other embodiments, the NLS is an optimized NLS described, for example, by Koblan et al., Nature Biotech. 2018 doi:10.1038/nbt.4172. In some embodiments, an NLS comprises the amino acid sequence

(SEQ ID NO: 190)
KRTADGSEFESPKKKRKV,
(SEQ ID NO: 191)
KRPAATKKAGQAKKKK,
(SEQ ID NO: 192)
KKTELQTTNAENKTKKL,
(SEQ ID NO: 193)
KRGINDRNFWRGENGRKTR,
(SEQ ID NO: 194)
RKSGKIAAIVVKRPRK,
(SEQ ID NO: 195)
PKKKRKV,
(SEQ ID NO: 196)
MDSLLMNRRKFLYQFKNVRWAKGRRETYLC,
(SEQ ID NO: 328)
PKKKRKVEGADKRTADGSEFESPKKKRKV,
or
(SEQ ID NO: 329)
RKSGKIAAIVVKRPRKPKKKRKV.

[0143] The term “nucleobase,” “nitrogenous base,” or “base,” used interchangeably herein, refers to a nitrogen-containing biological compound that forms a nucleoside, which in turn is a component of a nucleotide. The ability of nucleobases to form base pairs and to stack one upon another leads directly to long-chain helical structures such as ribonucleic acid (RNA) and deoxyribonucleic acid (DNA). Five nucleobases—adenine (A), cytosine (C), guanine (G), thymine (T), and uracil (U)—are called primary or canonical. Adenine and guanine are derived from purine, and cytosine, uracil, and thymine are derived from pyrimidine. DNA and RNA can also contain other (non-primary) bases that are modified. Non-limiting exemplary modified nucleobases can include hypoxanthine, xanthine, 7-methylguanine, 5,6-dihydrouracil, 5-methylcytosine (m5C), and 5-hydromethylcytosine. Hypoxanthine and xanthine can be created through mutagen presence, both of them through deamination (replacement of the amine group with a carbonyl group). Hypoxanthine can be modified from adenine. Xanthine can be modified from guanine. Uracil can result from deamination of cytosine. A “nucleoside” consists of a nucleobase and a five carbon sugar (either ribose or deoxyribose). Examples of a nucleoside include adenosine, guanosine, uridine, cytidine, 5-methyluridine (m5U), deoxyadenosine, deoxyguanosine, thymidine, deoxyuridine, and deoxycytidine. Examples of a nucleoside with a modified nucleobase includes inosine (I), xanthosine (X), 7-methylguanosine (m7G), dihydrouridine (D), 5-methylcytidine (m5C), and pseudouridine (Y). A “nucleotide” consists of a nucleobase, a five carbon sugar (either ribose or deoxyribose), and at least one phosphate group. Non-limiting examples of modified nucleobases and/or chemical modifications that a modified nucleobase may include are the following: pseudo-uridine, 5-Methyl-cytosine, 2′-O-methyl-3′-phosphonoacetate, 2′-O-methyl thioPACE (MSP), 2′-O-methyl-PACE (MP), 2′-fluoro RNA (2′-F-RNA), constrained ethyl (S-cEt), 2′-O-methyl (‘M’), 2′-O-methyl-3′-phosphorothioate (‘MS’), 2′-O-methyl-3′-thiophosphonoacetate (‘MSP’), 5-methoxyuridine, phosphorothioate, and N1-Methylpseudouridine.

[0144] The term “nucleic acid programmable DNA binding protein” or “napDNAbp” may be used interchangeably with “polynucleotide programmable nucleotide binding domain” to refer to a protein that associates with a nucleic acid (e.g., DNA or RNA), such as a guide nucleic acid or guide polynucleotide (e.g., gRNA), that guides the napDNAbp to a specific nucleic acid sequence. In some embodiments, the polynucleotide programmable nucleotide binding domain is a polynucleotide programmable DNA binding domain. In some embodiments, the polynucleotide programmable nucleotide binding domain is a polynucleotide programmable RNA binding domain. In some embodiments, the polynucleotide programmable nucleotide binding domain is a Cas9 protein. A Cas9 protein can associate with a guide RNA that guides the Cas9 protein to a specific DNA sequence that is complementary to the guide RNA. In some embodiments, the napDNAbp is a Cas9 domain, for example a nuclease active Cas9, a Cas9 nickase (nCas9), or a nuclease inactive Cas9 (dCas9). Non-limiting examples of nucleic acid programmable DNA binding proteins include, Cas9 (e.g., dCas9 and nCas9), Cas12a/Cpf1, Cas12b/C2c1, Cas12c/C2c3, Cas12d/CasY, Cas12e/CasX, Cas12g, Cas12h, Cas12i, and Cas12j/CasΦ (Cas12j/Casphi). Non-limiting examples of Cas enzymes include Cas1, Cas1B, Cas2, Cas3, Cas4, Cas5, Cas5d, Cas5t, Cas5h, Cas5a, Cas6, Cas7, Cas8, Cas8a, Cas8b, Cas8c, Cas9 (also known as Csn1 or Csx12), Cas10, Cas10d, Cas12a/Cpf1, Cas12b/C2c1, Cas12c/C2c3, Cas12d/CasY, Cas12e/CasX, Cas12g, Cas12h, Cas12i, Cas12j/CasΦ, Cpf1, Csy1, Csy2, Csy3, Csy4, Cse1, Cse2, Cse3, Cse4, Cse5e, Csc1, Csc2, Csa5, Csn1, Csn2, Csm1, Csm2, Csm3, Csm4, Csm5, Csm6, Cmr1, Cmr3, Cmr4, Cmr5, Cmr6, Csb1, Csb2, Csb3, Csx17, Csx14, Csx10, Csx16, CsaX, Csx3, Csx1, Csx1S, Csx11, Csf1, Csf2, CsO, Csf4, Csd1, Csd2, Cst1, Cst2, Csh1, Csh2, Csa1, Csa2, Csa3, Csa4, Csa5, Type II Cas effector proteins, Type V Cas effector proteins, Type VI Cas effector proteins, CARF, DinG, homologues thereof, or modified or engineered versions thereof. Other nucleic acid programmable DNA binding proteins are also within the scope of this disclosure, although they may not be specifically listed in this disclosure. See, e.g., Makarova et al. “Classification and Nomenclature of CRISPR-Cas Systems: Where from Here?” CRISPR J. 2018 October; 1:325-336. doi: 10.1089/crispr.2018.0033; Yan et al., “Functionally diverse type V CRISPR-Cas systems” Science. 2019 Jan. 4; 363 (6422): 88-91. doi: 10.1126/science.aav7271, the entire contents of each are hereby incorporated by reference. Exemplary nucleic acid programmable DNA binding proteins and nucleic acid sequences encoding nucleic acid programmable DNA binding proteins are provided in the Sequence Listing as SEQ ID NOs: 197-245, 254-260, and 378.

[0145] The terms “nucleobase editing domain” or “nucleobase editing protein,” as used herein, refers to a protein or enzyme that can catalyze a nucleobase modification in RNA or DNA, such as cytosine (or cytidine) to uracil (or uridine) or thymine (or thymidine), and adenine (or adenosine) to hypoxanthine (or inosine) deaminations, as well as non-templated nucleotide additions and insertions. In some embodiments, the nucleobase editing domain is a deaminase domain (e.g., an adenine deaminase or an adenosine deaminase; or a cytidine deaminase or a cytosine deaminase).

[0146] As used herein, “obtaining” as in “obtaining an agent” includes synthesizing, purchasing, or otherwise acquiring the agent.

[0147] By “subject” or “patient” is meant a mammal, including, but not limited to, a human or non-human mammal. In embodiments, the mammal is a bovine, equine, canine, ovine, rabbit, rodent, nonhuman primate, or feline. In an embodiment, “patient” refers to a mammalian subject with a higher than average likelihood of developing a disease or a disorder. Exemplary patients can be humans, non-human primates, cats, dogs, pigs, cattle, cats, horses, camels, llamas, goats, sheep, rodents (e.g., mice, rabbits, rats, or guinea pigs) and other mammalians that can benefit from the therapies disclosed herein. Exemplary human patients can be male and/or female.

[0148] “Patient in need thereof” or “subject in need thereof” is referred to herein as a patient diagnosed with, at risk or having, predetermined to have, or suspected of having a disease or disorder.

[0149] The terms “pathogenic mutation”, “pathogenic variant”, “disease causing mutation”, “disease causing variant”, “deleterious mutation”, or “predisposing mutation” refers to a genetic alteration or mutation that is associated with a disease or disorder or that increases an individual's susceptibility or predisposition to a certain disease or disorder. In some embodiments, the pathogenic mutation comprises at least one wild-type amino acid substituted by at least one pathogenic amino acid in a protein encoded by a gene. In some embodiments, the pathogenic mutation is in a terminating region (e.g., stop codon). In some embodiments, the pathogenic mutation is in a non-coding region (e.g., intron, promoter, etc.).

[0150] The term “pharmaceutically-acceptable carrier” means a pharmaceutically-acceptable material, composition or vehicle, such as a liquid or solid filler, diluent, excipient, manufacturing aid (e.g., lubricant, talc magnesium, calcium or zinc stearate, or steric acid), or solvent encapsulating material, involved in carrying or transporting the compound from one site (e.g., the delivery site) of the body, to another site (e.g., organ, tissue or portion of the body). A pharmaceutically acceptable carrier is “acceptable” in the sense of being compatible with the other ingredients of the formulation and not injurious to the tissue of the subject (e.g., physiologically compatible, sterile, physiologic pH, etc.). The terms such as “excipient,” “carrier,” “pharmaceutically acceptable carrier,” “vehicle,” or the like are used interchangeably herein.

[0151] The term “pharmaceutical composition” means a composition formulated for pharmaceutical use. In some embodiments, the pharmaceutical composition further comprises a pharmaceutically acceptable carrier. In some embodiments, the pharmaceutical composition comprises additional agents (e.g., for specific delivery, increasing half-life, or other therapeutic compounds).

[0152] The terms “protein”, “peptide”, “polypeptide”, and their grammatical equivalents are used interchangeably herein, and refer to a polymer of amino acid residues linked together by peptide (amide) bonds. A protein, peptide, or polypeptide can be naturally occurring, recombinant, or synthetic, or any combination thereof.

[0153] The term “fusion protein” as used herein refers to a hybrid polypeptide which comprises protein domains from at least two different proteins.

[0154] The term “recombinant” as used herein in the context of proteins or nucleic acids refers to proteins or nucleic acids that do not occur in nature, but are the product of human engineering. For example, in some embodiments, a recombinant protein or nucleic acid molecule comprises an amino acid or nucleotide sequence that comprises at least one, at least two, at least three, at least four, at least five, at least six, or at least seven mutations as compared to any naturally occurring sequence.

[0155] By “reduces” is meant a negative alteration of at least 10%, 25%, 50%, 75%, or 100%.

[0156] By “reference” is meant a standard or control condition. In one embodiment, the reference is a wild-type or healthy cell. In one embodiment, the reference is an unedited cell (e.g., an unmodified immune cell). In other embodiments and without limitation, a reference is an untreated cell that is not subjected to a test condition, or is subjected to placebo or normal saline, medium, buffer, and/or a control vector that does not harbor a polynucleotide of interest. In some cases, the reference is an unedited or wild type cell (e.g., a T cell). In some embodiments, the reference is a B2M KO T cell that does not encode a polypeptide or polypeptide variant of interest (e.g., an HLA class-I single-chain dimer or trimer of the present disclosure or a modified B2M polypeptide of the present disclosure) or encodes a polypeptide that lacks one or more amino acid alterations (e.g., a W60G, W95G, and/or K58E alteration to a B2M polypeptide and/or a D227K, T228A, and/or A245V alteration to an HLA-A, -B, or -C polypeptide).

[0157] A “reference sequence” is a defined sequence used as a basis for sequence comparison. A reference sequence may be a subset of or the entirety of a specified sequence; for example, a segment of a full-length cDNA or gene sequence, or the complete cDNA or gene sequence. For polypeptides, the length of the reference polypeptide sequence will generally be at least about 16 amino acids, at least about 20 amino acids, at least about 25 amino acids, about 35 amino acids, about 50 amino acids, or about 100 amino acids. For nucleic acids, the length of the reference nucleic acid sequence will generally be at least about 50 nucleotides, at least about 60 nucleotides, at least about 75 nucleotides, about 100 nucleotides or about 300 nucleotides or any integer thereabout or therebetween. In some embodiments, a reference sequence is a wild-type sequence of a protein of interest. In other embodiments, a reference sequence is a polynucleotide sequence encoding a wild-type protein.

[0158] The term “RNA-programmable nuclease,” and “RNA-guided nuclease” refer to a nuclease that forms a complex with (e.g., binds or associates with) one or more RNA(s) that is not a target for cleavage. In some embodiments, an RNA-programmable nuclease, when in a complex with an RNA, may be referred to as a nuclease: RNA complex. Typically, the bound RNA(s) is referred to as a guide RNA (gRNA). In some embodiments, the RNA-programmable nuclease is the (CRISPR-associated system) Cas9 endonuclease, for example, Cas9 (Csn1) from Streptococcus pyogenes (e.g., SEQ ID NO: 197), Cas9 from Neisseria meningitidis (NmeCas9; SEQ ID NO: 208), Nme2Cas9 (SEQ ID NO: 209), Streptococcus constellatus (ScoCas9), or derivatives thereof (e.g., a sequence with at least about 85% sequence identity to a Cas9, such as Nme2Cas9 or spCas9).

[0159] The term “single nucleotide polymorphism (SNP)” is a variation in a single nucleotide that occurs at a specific position in the genome, where each variation is present to some appreciable degree within a population (e.g., >1%). SNPs can fall within coding regions of genes, non-coding regions of genes, or in the intergenic regions (regions between genes). In some embodiments, SNPs within a coding sequence do not necessarily change the amino acid sequence of the protein that is produced, due to degeneracy of the genetic code. SNPs in the coding region are of two types: synonymous and nonsynonymous SNPs. Synonymous SNPs do not affect the protein sequence, while nonsynonymous SNPs change the amino acid sequence of protein. The nonsynonymous SNPs are of two types: missense and nonsense. SNPs that are not in protein-coding regions can still affect gene splicing, transcription factor binding, messenger RNA degradation, or the sequence of noncoding RNA. Gene expression affected by this type of SNP is referred to as an eSNP (expression SNP) and can be upstream or downstream from the gene. A single nucleotide variant (SNV) is a variation in a single nucleotide without any limitations of frequency and can arise in somatic cells. A somatic single nucleotide variation can also be called a single-nucleotide alteration.

[0160] By “specifically binds” is meant a nucleic acid molecule, polypeptide, polypeptide/polynucleotide complex, compound, or molecule that recognizes and binds a target polypeptide and/or nucleic acid molecule of the disclosure, but which does not substantially recognize and bind other molecules in a sample, for example, a biological sample.

[0161] By “substantially identical” is meant a polypeptide or nucleic acid molecule exhibiting at least 50% identity to a reference amino acid sequence. In one embodiment, a reference sequence is a wild-type amino acid or nucleic acid sequence. In another embodiment, a reference sequence is any one of the amino acid or nucleic acid sequences described herein. In one embodiment, such a sequence is at least about 60%, 80%, 85%, 90%, 95%, 96%, 97%, 98%, 99%, 99.9%, or even 99.99%, identical at the amino acid level or nucleic acid level to the sequence used for comparison.

[0162] Sequence identity is typically measured using sequence analysis software (for example, Sequence Analysis Software Package of the Genetics Computer Group, University of Wisconsin Biotechnology Center, 1710 University Avenue, Madison, Wis. 53705, BLAST, BESTFIT, GAP, or PILEUP/PRETTYBOX programs). Such software matches identical or similar sequences by assigning degrees of homology to various substitutions, deletions, and/or other modifications. Conservative substitutions typically include substitutions within the following groups: glycine, alanine; valine, isoleucine, leucine; aspartic acid, glutamic acid, asparagine, glutamine; serine, threonine; lysine, arginine; and phenylalanine, tyrosine.

[0163] Nucleic acid molecules useful in the methods of the disclosure include any nucleic acid molecule that encodes a polypeptide of the disclosure or a functional fragment thereof. Such nucleic acid molecules need not be 100% identical with an endogenous nucleic acid sequence, but will typically exhibit substantial identity. Polynucleotides having “substantial identity” to an endogenous sequence are typically capable of hybridizing with at least one strand of a double-stranded nucleic acid molecule. Nucleic acid molecules useful in the methods of the disclosure include any nucleic acid molecule that encodes a polypeptide of the disclosure or a functional fragment thereof. Such nucleic acid molecules need not be 100% identical with an endogenous nucleic acid sequence, but will typically exhibit substantial identity. Polynucleotides having “substantial identity” to an endogenous sequence are typically capable of hybridizing with at least one strand of a double-stranded nucleic acid molecule. By “hybridize” is meant pair to form a double-stranded molecule between complementary polynucleotide sequences (e.g., a gene described herein), or portions thereof, under various conditions of stringency. (See, e.g., Wahl, G. M. and S. L. Berger (1987) Methods Enzymol. 152:399; Kimmel, A. R. (1987) Methods Enzymol. 152:507).

[0164] By “split” is meant divided into two or more fragments.

[0165] A “split polypeptide” or “split protein” refers to a protein that is provided as an N-terminal fragment and a C-terminal fragment translated as two separate polypeptides from a nucleotide sequence(s). The polypeptides corresponding to the N-terminal portion and the C-terminal portion of the split protein may be spliced to form a “reconstituted” protein.

[0166] The term “target cell” refers to a cell that is acted on by another cell. In an embodiment, the target cell is a modified immune cell that is the target of the host immune system.

[0167] The term “target site” refers to a nucleotide sequence or nucleotide of interest within a nucleic acid molecule that is modified. In embodiments, the modification is deamination of a base. The deaminase can be a cytidine or an adenine deaminase. The fusion protein or base editing complex comprising a deaminase may comprise a dCas9-adenosine deaminase fusion protein, a Cas12b-adenosine deaminase fusion, or a base editor disclosed herein.

[0168] As used herein, the terms “treat,” treating,” “treatment,” and the like refer to reducing or ameliorating a disorder and/or symptoms associated therewith or obtaining a desired pharmacologic and/or physiologic effect. It will be appreciated that, although not precluded, treating a disorder or condition does not require that the disorder, condition or symptoms associated therewith be completely eliminated. In some embodiments, the effect is therapeutic, i.e., without limitation, the effect partially or completely reduces, diminishes, abrogates, abates, alleviates, reduces the intensity of, or cures a disease and/or adverse symptom attributable to the disease. In some embodiments, the effect is preventative, i.e., the effect protects or prevents an occurrence or reoccurrence of a disease or condition. To this end, the presently disclosed methods comprise administering a therapeutically effective amount of a composition as described herein.

[0169] By “tumor necrosis factor alpha (TNF-alpha) polypeptide” is meant a protein having at least about 85% amino acid sequence identity to GenBank accession No. CAA26669.1, which is provided below, or a functional fragment thereof having immunomodulatory activity.

>CAA26669.1 TNF-alpha [Homo sapiens]

(SEQ ID NO: 453)
MSTESMIRDVELAEEALPKKTGGPQGSRRCLF
LSLFSFLIVAGATTLFCLLHFGVIGPQREEFP
RDLSLISPLAQAVRSSSRTPSDKPVAHVVANP
QAEGQLQWLNRRANALLANGVELRDNQLVVPS
EGLYLIYSQVLFKGQGCPSTHVLLTHTISRIA
VSYQTKVNLLSAIKSPCQRETPEGAEAKPWYE
PIYLGGVFQLEKGDRLSAEINRPDYLDFAESG
QVYFGIIAL.

[0170] By “tumor necrosis factor alpha (TNF-alpha) polynucleotide” is meant a nucleic acid molecule encoding an TNF-alpha polypeptide, as well as the introns, exons, 3′ untranslated regions, 5′ untranslated regions, and regulatory sequences associated with its expression, or fragments thereof. An exemplary human TNF-alpha polynucleotide sequence is provided at Ensembl Accession No. ENSG00000232810.

[0171] By “uracil glycosylase inhibitor” or “UGI” is meant an agent that inhibits the uracil-excision repair system. Base editors comprising a cytidine deaminase convert cytosine to uracil, which is then converted to thymine through DNA replication or repair. In various embodiments, a uracil DNA glycosylase (UGI) prevent base excision repair which changes the U back to a C. In some instances, contacting a cell and/or polynucleotide with a UGI and a base editor prevents base excision repair which changes the U back to a C. An exemplary UGI comprises an amino acid sequence as follows:

>splP14739IUNGI_BPPB2 Uracil-DNA glycosylase inhibitor

(SEQ ID NO: 231)
MTNLSDIIEKETGKQLVIQESILMLPEEVEEVIG
NKPESDILVHTAYDESTDENVMLLTSDAPEYKPW
ALVIQDSNGENKIKML.

[0172] In some embodiments, the agent inhibiting the uracil-excision repair system is a uracil stabilizing protein (USP). See, e.g., WO 2022015969 A1, incorporated herein by reference.

[0173] As used herein, the term “vector” refers to a means of introducing a nucleic acid molecule into a cell, resulting in a transformed cell. Vectors include plasmids, transposons, phages, viruses, liposomes, lipid nanoparticles, and episomes.

[0174] Ranges provided herein are understood to be shorthand for all of the values within the range. For example, a range of 1 to 50 is understood to include any number, combination of numbers, or sub-range from the group consisting 1, 2, 3, 4, 5, 6, 7, 8, 9, 10, 11, 12, 13, 14, 15, 16, 17, 18, 19, 20, 21, 22, 23, 24, 25, 26, 27, 28, 29, 30, 31, 32, 33, 34, 35, 36, 37, 38, 39, 40, 41, 42, 43, 44, 45, 46, 47, 48, 49, or 50.

[0175] The recitation of a listing of chemical groups in any definition of a variable herein includes definitions of that variable as any single group or combination of listed groups. The recitation of an embodiment for a variable or aspect herein includes that embodiment as any single embodiment or in combination with any other embodiments or portions thereof.

[0176] All terms are intended to be understood as they would be understood by a person skilled in the art. Unless defined otherwise, all technical and scientific terms used herein have the same meaning as commonly understood by one of ordinary skill in the art to which the disclosure pertains

[0177] In this application, the use of the singular includes the plural unless specifically stated otherwise. It must be noted that, as used in the specification, the singular forms “a,” “an” and “the” include plural referents unless the context clearly dictates otherwise. In this application, the use of “or” means “and/or” unless stated otherwise. Furthermore, use of the term “including” as well as other forms, such as “include”, “includes,” and “included,” is not limiting.

[0178] As used in this specification and claim(s), the words “comprising” (and any form of comprising, such as “comprise” and “comprises”), “having” (and any form of having, such as “have” and “has”), “including” (and any form of including, such as “includes” and “include”) or “containing” (and any form of containing, such as “contains” and “contain”) are inclusive or open-ended. This wording indicates that specified elements, features, components, and/or method steps are present, but does not exclude the presence of other elements, features, components, and/or method steps. Any embodiments specified as “comprising” a particular component(s) or element(s) are also contemplated as “consisting of” or “consisting essentially of” the particular component(s) or element(s) in some embodiments. It is contemplated that any embodiment discussed in this specification can be implemented with respect to any method or composition of the present disclosure, and vice versa. Furthermore, compositions of the present disclosure can be used to achieve methods of the present disclosure.

[0179] The term “about” or “approximately” means within an acceptable error range for the particular value as determined by one of ordinary skill in the art, which will depend in part on how the value is measured or determined, i.e., the limitations of the measurement system.

[0180] Reference in the specification to “some embodiments,” “an embodiment,” “one embodiment” or “other embodiments” means that a particular feature, structure, or characteristic described in connection with the embodiments is included in at least some embodiments, but not necessarily all embodiments, of the present disclosures.

### BRIEF DESCRIPTION OF THE DRAWINGS

[0181] FIG. 1 provides a schematic showing an embodiment of a method for generating HLA class-I attenuated allogeneic immune cells. First, allogeneic immune cells are edited by contacting the cells with a base editor and a guide RNA (gRNA) targeting an endogenous beta-2-microglobulin (B2M) polynucleotide in the cells to modify a nucleobase of the B2M polynucleotide, where modification of the nucleobase leads to ablation of surface-display of HLA class-I polypeptides on the cells. Then, surface-display of HLA class-I polypeptides is reconstituted so that expression and/or activity of HLA class-I polypeptides is attenuated relative to unedited cell expression. In various embodiments, this is done by 1) expressing B2M in the cells under the control of a promoter (e.g., an altered or heterologous promoter) that effects reduced levels (e.g., mRNA transcript and/or polypeptide levels) of B2M in the cells relative to levels in a wild type cell, and/or 2) expressing in the cells a B2M polypeptide containing an amino acid alteration(s) (e.g., W60G, W95G) that reduce the affinity of B2M for HLA class-I heavy chain polypeptides. In embodiments, expressing the altered B2M polypeptide in the cells involves modifying a B2M polynucleotide in the cells.

[0182] FIGS. 2A and 2B provide a schematic and a bar graph. FIG. 2A provides a schematic showing lentiviral constructs generated that contained polynucleotides encoding polypeptides containing from N-terminus to C-terminus: A) a CD4 extracellular domain based chimeric antigen receptor (CD4 CAR), B) a T2A self-cleaving peptide, and C) either i) a wild-type B2M polypeptide (i.e., B2M (WT)) or ii) a B2M polypeptide containing a W60G alteration (i.e., B2M (W60G)). Expression of the polypeptides was driven by a human EF1-alpha (EF1a) promoter. FIG. 2B provides a bar graph showing the frequency of lentiviral transduced cells expressing B2M (WT) or B2M (W60G). In FIG. 2B, “UTD” indicates untransduced cells.

[0183] FIGS. 3A-3C provide histograms and bar graphs demonstrating that when B2M expression was driven by an EF1a promoter, surface-display of reconstituted B2M (WT) was less than endogenous B2M in unmodified cells, and that the W60G alteration further reduced B2M surface-display levels relative to wild type cells. FIG. 3A provides flow cytometry histograms showing that B2M surface-display levels in unmodified T cells (unmodified) was higher than that observed in cells containing a B2M polynucleotide base-edited to knock out expression of endogenous B2M (“B2M edit”) or cells containing the B2M edit to knock out endogenous B2M expression and containing a polypeptide encoding B2M (WT) or B2M (W60G) under the control of the EF1a promoter to reconstitute B2M expression. FIG. 3B provides a bar graph showing a reduction, as measured using flow cytometry, in B2M geometric mean fluorescent intensity (gMFI) in CD4+ T cells containing the B2M edit (i.e., B2M knock-out cells (B2M KO cells)) or cells containing the B2M edit (B2M KO) and expressing B2M (WT) or B2M (W60G) under the control of the EF1a promoter. FIG. 3C provides a bar graph showing a reduction, as measured using flow cytometry, in B2M geometric mean fluorescent intensity (gMFI) in CD8+ T cells containing the B2M edit (i.e., B2M knock-out cells (B2M KO cells)) or cells containing the B2M edit (B2M KO) and expressing B2M (WT) or B2M (W60G) under the control of the EF1a promoter. In FIGS. 3B and 3C, the percent loss is measured relative to wild type cells.

[0184] FIGS. 4A and 4B provide histograms and a bar graph. FIG. 4A provides flow cytometry histograms showing that reconstituting B2M expression in cells containing the B2M edit (i.e., cells base edited to knock out endogenous expression of B2M) by expressing B2M (WT) or B2M (W60G) under the control of the EF1a promoter in the cells restored surface-display levels of HLA-A2 on the cells. The numbers above each histogram in FIG. 4A indicate the percent of total cells counted that had HLA-A2 surface-display levels falling within the range indicated by the horizontal line. FIG. 4B provides a bar graph showing the levels of HLA-A2 surface-display levels measured as percent geometric mean fluorescent intensity (gMFI) relative to wild type cells observed in cells containing the B2M edit and expressing B2M (WT) or B2M (W60G) under the control of the EF1a promoter to reconstitute B2M expression. Cells reconstituting B2M expression by expressing B2M (WT) or B2M (W60G) showed reduced levels of surface-display (i.e., surface-expression) of HLA-A2.

[0185] FIGS. 5A and 5B present flow cytometry contour plots and a plot showing that reconstituting B2M expression in T cells through expression of B2M (W60G) in the T cells protected the T cells from alloreactive T cell lysis. FIG. 5A provides a set of flow cytometry contour plots showing that B2M knock-out T cells reconstituting B2M expression through expression of B2M WT under the control of an EF1a promoter were more susceptible to alloreactive T cell lysis than were B2M knock-out T cells reconstituting B2M expression through expression of B2M (W60G) under the control of the EF1a promoter. Cell lysis was evaluated using a T cell mixed leukocyte reaction, where the effector cells (E) were mismatched (i.e., alloreactive) T cells and the target cells (T) were the B2M KO cells expressing B2M (W60G) or B2M (WT) to reconstitute B2M expression. Cell lysis was evaluated at effector to target cell ratios (E: T) of 0:1 and 20:1. The numbers within the plots of FIG. 5A indicate the percent of counted cells falling within the outlined region, which corresponds to unlysed cells. Cells were counted after 48 hours of co-culture using fluorescent antibodies targeting CD8 (x-axis) and CD4 (y-axis). FIG. 5B provides a plot showing percent cell lysis observed at the various E: T ratios indicated on the x-axis in T cell mixed leukocyte reactions similar to those described for FIG. 5A. Cells were counted after 48 hours of co-culture. In FIG. 5A “BV510” represents the fluorescent dye Brilliant Violet 510TM and “PE-Cy™7” represents a tandem fluorophore that can be excited by a broad range of lasers including, for example, 488 nm, 532 nm, and 561 nm.

[0186] FIG. 6 provides a schematic showing the generation of allogeneic immune cells expressing a beta-2-microglobulin (B2M) polypeptide containing an alteration (e.g., K58E) that abrogates CD8 binding. Endogenous expression of B2M in the cells is knocked out using base editing to modify the B2M gene in the cells and expression of B2M is reconstituted in the cells by contacting the cells with a polynucleotide encoding the B2M polypeptide containing the alteration that abrogates CD8 binding (i.e., B2M (K58E)). The base editor to the B2M gene is associated with a reduction or ablation of surface-display of HLA class-I polypeptides on the cells. The base editing is carried out by contacting the cells with a base editor and a guide RNA (gRNA) targeting an endogenous B2M gene. Reconstitution of B2M expression in the cells is associated with a reconstitution of surface-display of HLA class-I polypeptides on the cells. The B2M (K58E) polypeptide has a reduced affinity for CD8 present on alloreactive T cells relative to a wild type B2M polypeptide.

[0187] FIGS. 7A-7C provide schematics of polypeptides containing an HLA class-I heavy chain (HLA-X) domain and how the polypeptides can be used to reduce or abrogate alloreactive T cell CD8 binding. FIG. 7A provides a schematic showing an HLA class-I single-chain dimer containing from N-terminus to C-terminus: a signal peptide (light grey box), a beta-2-microglobulin (B2M) domain, a linker (black box), and an HLA class-I heavy chain (HLA-X) domain. FIG. 7B provides a schematic showing an HLA class-I single chain trimer containing from N-terminus to C-terminus: a signal peptide (light grey box), a cognate peptide (cPEP) domain, a linker (black box), a B2M domain, a linker (black box), and an HLA class-I heavy chain (HLA-X) domain. In embodiments, the B2M domain contains an amino acid alteration that reduces or abrogates CD8 binding (e.g., a K58E alteration). In FIGS. 7A-7C, HLA-X represents an HLA class-I heavy chain domain derived from an HLA-A, HLA-B, =HLA-C, or HLA-E polypeptide. In embodiments, the HLA-X domain contains one or more amino acid alterations that reduce or abrogate binding to CD8 (e.g., D227K, T228A, and/or A245V). FIG. 7C provides a schematic showing how, in some embodiments, expression of an HLA-X polypeptide and/or HLA-X domain-containing polypeptide (e.g., the HLA class-I single chain dimer or HLA class-I single chain trimer) of the present disclosure in a T cell reduces or eliminates alloreactive T cell CD8 binding.

[0188] FIG. 8 provides a collection of flow cytometry contour plots showing surface-expression levels of HLA-A2 single-chain dimer polypeptides in B2M knock-out T cells contacted with lentiviral vectors containing polynucleotides encoding HLA-A2 single-chain dimer polypeptides containing a wild type (WT) HLA-A2 domain or an HLA-A2 domain containing a D227K/T228A alteration, an A245V alteration, or a D227K/T228A/A246V alteration (i.e., HLA-A2 (WT), HLA-A2 (D227K/T228A), HLA-A2 (A245V), and HLA-A2 (D227K/T228A/A246V), respectively), as indicated above the plots, and a wild type (WT) B2M domain or a B2M (K58E) domain, as indicated to the left of the plots (see FIG. 7A for a schematic of HLA class-I single-chain dimers). The alterations to the HLA-A2 domain were within the alpha-3 domain of HLA-A2. All cells were base-edited to knock out endogenous expression of B2M. The numbers in each plot indicate the percent of total counted cells falling within each respective quadrant delimited by the two crossed lines. In FIG. 8, “EGFR” represents a truncated epidermal growth factor receptor (EGFR), APC represents “allophycocyanin”, and “PE” represents phycoerythrin.

[0189] FIGS. 9A-9C provide bar graphs demonstrating that alterations in the alpha-3 domain of HLA-A2 single-chain dimer polypeptides expressed by B2M knock-out T cells reduced cytokine production by alloreactive T cells co-cultured with the B2M knock-out T cells. B2M knock-out T cells expressing HLA-A2 single-chain dimers containing the B2M domain and/or HLA-A2 domain alterations indicated beneath the x-axis were co-cultured with alloreactive T cells for 24 hours, after which supernatants were harvested and secretion of granzyme B (GZMB) (FIG. 9A), IFN-gamma (FIG. 9B), and TNF-alpha (FIG. 9C) were measured. In each of FIGS. 9A-9C, the y-axis indicates analyte production levels as a percentage of maximum production measured for alloreactive T cells co-cultured for 24 hours with B2M knock-out T cells expressing HLA-A2 single-chain dimer polypeptides containing a WT B2M domain and a WT HLA-A2 domain (WT B2M/HLA-A2). In FIGS. 9A-9C is included a matrix indicating the sequence of the B2M (i.e., WT or K58E) and HLA-A2 (i.e., WT, D227K/T228A, D227K/T228A/A245V, or A245V) domains of each HLA-A2 single-chain dimer polypeptide corresponding to each bar.

[0190] FIGS. 10A and 10B provide flow cytometry contour plots and a plot showing results from a cytotoxicity assay in which allogeneic T cells base edited to knock-out endogenous expression of beta-2-microglobulin and expressing HLA-A2 single-chain dimer polypeptides containing the indicated B2M and HLA-A2 domains were co-cultured with HLA-A2 alloreactive T cells for 48 hours. Cells expressing an HLA-A2 single-chain dimer polypeptide containing an HLA-A2 domain with a D227K/T228A alteration showed the greatest levels of protection from alloreactive T cell lysis. FIG. 10A provides flow cytometry contour plots showing that cells B2M knock-out cells expressing an HLA-A2 single-chain dimer polypeptide containing a wild type B2M domain (B2M (WT)) and an HLA-A2 domain containing a D227K/T228A alteration (A*02 (D-K/T-A) showed greater protection from lysis by alloreactive T cells than B2M knock-out cells expressing an HLA-A2 single-chain dimer polypeptide containing a B2M (WT) domain and a wild type HLA-A2 domain (A*02 (WT)). The B2M knock-out cells expressing the HLA-A2 single-chain dimer polypeptides were co-cultured as target cells (T) in the presence of HLA-A2 alloreactive T cells at the indicated ratios for 48 hours prior to cell counts carried out using flow cytometry. The target allogeneic T cells (right portion of each plot) all expressed a truncated epidermal growth factor receptor (EGFR) and an HLA-A2 single-chain dimer polypeptide, and off-target cells did not express EGFR (left portion of each plot) or the single-chain dimer polypeptide. The numbers listed in the plots indicate the number of total counted cells falling within the corresponding portion of the figure delimited by the vertical line. In FIG. 10A, “PE” represents phycoerythrin and “BV605” represents the tandem fluorochrome BD Horizon Brilliant Violet™ 605. FIG. 10B provides a plot summarizing results from cytotoxicity assays carried out as described for FIG. 10A using B2M KO cells expressing the HLA-A2 single-chain dimer polypeptides indicated in the legend. The highest levels of lysis were observed for cells expressing HLA-A2 single-chain dimer polypeptides containing B2M (WT) and wild-type HLA-A2 (A*02) domains.

[0191] FIG. 11 provides a collection of flow cytometry contour plots demonstrating surface-expression of the indicated HLA class-I single-chain dimers and trimers (see Tables 8A and 22) in B2M knock-out T cells transduced with polynucleotides encoding the same. In FIG. 11 the numbers 246-259 in the upper-left quadrant correspond to the ID #'s listed in Tables 8A and 9. In FIG. 11, the numbers having one or two decimal places indicate the percent of total counted cells falling within the indicated quadrant, “UE” indicates unedited cells, and “B2M KO” indicates cells edited using base-editing to knock out expression of B2M, where neither the UE cells nor the B2M KO cells expressed any of the HLA class-I single-chain dimers or trimers. Base-editing was carried out using ABE8.20m and a guide RNA targeting the B2M gene. Cells were co-stained for B2M and EGFR, which is co-surface-expressed with HLA class-I heavy chain polypeptides (e.g., HLA-A, HLA-B, HLA-C, and HLA-E).

[0192] FIGS. 12A-12C provide plots demonstrating that HLA-B and HLA-C HLA class-I single-chain dimers and trimers inhibited natural killer (NK) cell degranulation in vitro relative to B2M KO T cells. B2M knock-out T cells expressing the indicated HLA class-I single-chain dimers and trimers (see Tables 8A and 9) were co-cultured with primary human natural killer (NK) cells at a 1:1 effector-to-target cell ratio for 6 hours. The frequency of degranulating (CD107a+) NK cells was measured by fluorescent antibody staining using an anti-CD107a BV650 antibody. The NK cells were also stained with antibodies against inhibitory receptors including CD158a (FIG. 12A), CD158b (FIG. 12B), and CD158e1 (FIG. 12C). The plots of FIGS. 12A-12C each respectively show frequency of degranulating (i.e., CD107a+) NK cells in the subsets CD158a+, CD158b+, and CD158e1+, respectively. The grey boxes in FIGS. 12A-12C show the min-max range for % CD107a+. The minimum % CD107a+ value corresponds to the value measured for NK cells falling within a CD158a+ (FIG. 12A), CD158b+ (FIG. 12B), or CD158e1+ (FIG. 12C) subset when cultured with unmodified HLA-ABC+ T cells, and the maximum % CD107a+value corresponds to value measured for NK cells falling within a CD158a+ (FIG. 12A), CD158b+ (FIG. 12B), or CD158e1+ (FIG. 12C) subset when cocultured with B2M knock-out T cells. In FIGS. 12A-12C, the numbers listed below the x-axis correspond to the ID #'s listed in Tables 8A and 9.

[0193] FIG. 13 provides a plot demonstrating that reconstitution of HLA-A, -B, or -C surface-expression in B2M knock-out T cells conferred protection against NK cell lysis relative to untransduced on-target B2M knock-out cells. HLA-A, -B, or -C surface-expression was reconstituted in B2M knock-out T cells by transducing the cells with polynucleotides encoding the indicated HLA class-I single-chain dimers and trimers indicated beneath the x-axis of the plot of FIG. 13 (see Tables 8A and 9), such that the cells surface-expressed the encoded polypeptides. B2M knock-out T cells or B2M knock-out T cells surface-expressing the indicated HLA class-I single-chain dimers and trimers were mixed evenly with unmodified HLA-A+, -B+, C+ T cells (off-target), and then co-cultured with primary human NK cells at a 1:1 and 0:1 effector-to-target ratio for 48 hours. Then, specific lysis of on-target cells was calculated by determining the residual frequency of on-target cells in the presence of effector natural killer (NK) cells (i.e., 1:1 effector-to-target ratio) relative to a no effector NK cell control (i.e., 0:1 effector-to-target ratio). The plot of FIG. 13 shows the frequency of specific lysis of on-target cells mediated by NK cells.

[0194] FIGS. 14A and 14B provide schematics depicting HLA class-I single-chain dimers and trimers covalently fused to effector domains (i.e., “functionalized” single-chain dimers and trimers). The effector domains (alternatively “modules”) inhibit alloreactive T cells and/or natural killer cells. FIG. 14A provides a schematic depicting HLA class-I single-chain dimers and trimers fused (e.g., at the N-terminus) to an extracellular domain (ECD) of an effector domain (e.g., a PD-L1 domain, a CTLA4 domain, an HLA-A, -B, -C, or -E domain, and/or a B2M domain). In embodiments the extracellular domain of the effector domain is fused to the N-terminus of a membrane-bound HLA class-I single-chain dimer or trimer via a linker sequence. FIG. 14B provides a schematic depicting HLA class-I single-chain dimers and trimers fused (e.g., at the C-terminus) to a membrane-bound effector domain (e.g., CD47), optionally via a liker sequence. In embodiments, the HLA class-I single-chain dimer or trimer does not contain a transmembrane domain (TMB) (i.e., ΔTMD).

### DETAILED DESCRIPTION

[0195] The present disclosure features genetically modified allogeneic cells (e.g., immune cells, such as T- or NK-cells), and methods for producing and using these modified cells (e.g., T cells or NK cells) for the treatment of disease (e.g., cancer, autoimmune disease, etc.).

[0196] The disclosure is based, at least in part, on the discovery described further in the Examples provided herein that modified cell resistance to lysis by alloreactive T cells or natural killer (NK) cells is increased by modifying the cells to knock out endogenous expression of beta-2-microglobulin (B2M) (e.g., through base editing of the B2M gene) and reconstituting B2M expression in the cells by:
[0197] 1) Expressing in the cells a B2M polypeptide under the control of a promoter that reduces levels of B2M surface expression (e.g., a promoter that is weaker than the endogenous B2M promoter);
[0198] 2) Expressing in the cells a B2M polypeptide containing an amino acid alteration(s) (e.g., W60G, W95G) that reduces the affinity of B2M for HLA class-I heavy chain polypeptides; and/or
[0199] 3) Expressing in the cells an HLA class-I single-chain dimer or trimer of the present disclosure, where in some embodiments the single-chain dimer or trimer contains a B2M and/or HLA class I heavy chain domain containing alterations that reduce or eliminate binding to CD8 (e.g., a K58E alteration to the B2M domain and/or aD227K, T228A, and/or A245V alteration to the HLA class I heavy chain domain).

[0200] In some instances, the methods of the disclosure involve one or more of actions 1) through 3) listed above. In embodiments, the methods of the disclosure further involve knocking out expression of HLA-A and HLA-B and not of HLA-C in a cell. In some embodiments, knocking out expression of HLA-A and HLA-B and not of HLA-C involves contacting the cell with an appropriate base editor and a gRNA selected from TSBTx4193 and TSBTx4194, thereby knocking out expression of HLA-A and HLA-B and not of HLA-C. In some embodiments, knocking out expression of HLA-A and HLA-B and not of HLA-C involves contacting the cell with an appropriate base editor and a gRNA having a spacer sequence selected from the spacer sequence of TSBTx4193 or TSBTx4194, thereby knocking out expression of HLA-A and HLA-B and not of HLA-C.

### HLA Class-I Polypeptides

[0201] The HLA class-I polypeptides include the heavy chain class I polypeptides HLA-A, -B, and -C (see Sung Yoon Choo, “The HLA System: Genetics, Immunology, Clinical Testing, and Clinical Implications,” Yonsei Med J, 48:11-23 (2007), the disclosure of which is incorporated herein by reference in its entirety for all purposes). HLA class I molecules are expressed on the surface of almost all nucleated cells. The biological role of the HLA class I polypeptides is to present processed peptide antigens expressed within a cell to immune cells (e.g., T cells) and in immune cell activation by allogeneic cells (see, e.g., FIGS. 6 and 7).

[0202] HLA class I polypeptides contain glycosylated heavy chains encoded by the HLA class I genes (HLA-A, -B, and -C) and noncovalently bound extracellular beta-2-microglobulin (B2M). Human B2M is invariant and its gene maps to chromosome 15. The class I heavy chain has three extracellular domains (α₁, α₂, and α₃), a transmembrane region, and an intracytoplasmic domain. The α₁ and α2 domains contain variable amino acid sequences, and these domains determine the antigenic specificities of the HLA class I molecules. The α₃ and B2M domains together form immunoglobulin constant domain-like folds. The heavy chain α₁ and α₂ domains form a unique structure consisting of a platform of eight antiparallel β strands and two antiparallel α-helices on top of the platform. A groove is formed by the two α-helices and the β-pleated floor, and this is the binding site for processed peptide antigen. The class I peptide binding groove accommodates a processed peptide (e.g., a cognate peptide (cPep)) of 8 to 10 (predominantly nonamers) amino acid residues.

[0203] HLA-A and -B polypeptides can be grouped into superfamilies based upon various criteria, such as structure and/or peptide-binding specificity patterns. Non-limiting examples of HLA-A and -B polypeptides suitable for use in various aspects of the present disclosure include all known HLA-A and -B polypeptides falling within any known superfamily, such as those described in Harjanto, et al. “Clustering HLA Class I Superfamiiles Using Structural Interaction Patterns,” PLOS One, vol. 1, e86655; and/or Francisco, et al. “HLA supertype variation across populations: new insights into the role of natural selection in the evolution of HLA-A and HLA-B polymorphisms,” Immunogenetics, 67:651-663 (2015), the disclosures of which are incorporated herein by reference in their entireties for all purposes. Representative HLA-A superfamiles include A1, A2, A3, A24, and A6X. These HLA-A superfamilies each include the following alleles: A1 (A*0101, A*2601, A*2602, A*2603, A*2902, A*3002, A*8001), A2 (A*0201, A*0202, A*0203, A*0205, A*0206, A*0207, A*0211, A*0212, A*0216, A*0219), A3 (A*0301, A*0302, A*1101, A*3001, A*3101, A*3301, A*6801), A24 (A*2301, A*2402, A*2403), and A6X (A*6802, A*6901), where each superfamily name is followed in parenthesis by representative alleles falling within the superfamily. Representative HLA-B superfamiles include B7, B8, B27, B44, B58, and B62. These HLA-B superfamilies each include the following alleles: B7 (B*0702, B*3501, B*5101, B*5301, B*5401), B8 (B*0801, B*0802, B*0803), B27 (B*1402, B*2705, B*7301), B44 (B*4001, B*4002, B*4402, B*4403, B*4501), B58 (B*1516, B*1517, B*5701, B*5801), and B62 (B*1501, B*1502, B*1503, B*1509, B*3801, B*3901). where each superfamily name is followed in parenthesis by representative alleles falling within the superfamily.

### CAR-T Cell Therapies

[0204] Autologous, patient-derived chimeric antigen receptor-T cell (CAR-T) therapies have demonstrated remarkable efficacy in treating disease. While these products have led to significant clinical benefit for patients, the need to generate individualized therapies creates substantial manufacturing challenges and financial burdens. Allogeneic CAR-T therapies were developed as a potential solution to these challenges, having similar clinical efficacy profiles to autologous products while treating many patients with cells derived from a single healthy donor, thereby substantially reducing cost of goods and lot-to-lot variability. Allogeneic approaches are preferred over autologous cell preparation for a number of situations related to the uncertainty of engineering autologous T cells to express a CAR and finally achieving the desired cellular products for a transplant at the time of medical emergency.

[0205] However, for allogeneic T cells, or “off-the-shelf” T cells, it is important to carefully negotiate the host's reactivity to the CAR-T cells (HVGD), as well as the allogeneic T cell's potential hostility towards a host cell (GVHD). Additionally, adoptively transferred allogeneic CAR-T cells exhibit poor persistence in vivo due to recipient/host immune-mediated rejection mechanisms. Host-derived alloreactive T cells recognize allogeneic CAR-T cells as “non-self” by binding to peptide complexed with foreign Human Leukocyte Antigen (HLA) on the surface of CAR-T cells. The presence of surface peptide/HLA class-I negatively regulates Natural Killer (NK) cells by engaging inhibitory Killer Ig-Like Receptors (KIRs). As such, the absence of surface HLA on cells leaves them susceptible to NK cell-mediated lysis. Thus, generating HLA-deficient allogeneic CAR-T cells that are below the threshold to activate host-derived alloreactive T cell-mediated rejection and above the threshold to inhibit host-derived NK cells will likely improve allogeneic therapies.

[0206] Base editors (BEs) are a class of emerging gene editing reagents that enable highly efficient, user-defined modification of target genomic DNA without the creation of double-stranded breaks (DSBs). In contrast to a nuclease-only editing strategy, concurrent modification of one or more genetic loci by base editing produces highly efficient gene knock-outs with no detectable translocation events. Multiplex editing of genes is likely to be useful in the creation of CAR-T cell therapies with improved therapeutic properties. The methods described herein address known limitations of allogeneic immune cell (e.g., CAR-T cell) products and are a promising development towards the next generation of precision cell-based therapies.

[0207] The present disclosure provides modified allogeneic immune cells (e.g., T- or NK-cell) that are less susceptible to NK cell-mediated lysis and are able to overcome host-derived alloreactive T cell-mediated rejection. In some embodiments, the modified allogeneic immune cell described herein is an allogeneic modified CAR-T cell. In some embodiments, the CAR-T cell is an allogeneic T cell that expresses a desired CAR, and can be universally applicable, irrespective of the donor and the recipient's immunogenic compatibility. An allogenic immune cell may be derived from one or more donors. In certain embodiments, the allogenic immune cell is derived from a single human donor. For example, the allogenic T cell may be derived from PBMCs of a single healthy human donor. In certain embodiments, the allogenic immune cell is derived from multiple human donors. In some embodiments, an allogeneic immune cell may be generated, as described herein by using gene modification to introduce concurrent edits at one or more genetic loci. A modification, or concurrent modifications as described herein may be a genetic editing, such as a base editing, generated by a base editor. The base editor may be a C base editor or A base editor. As is discussed herein, base editing may be used to achieve a gene disruption, such that the gene is not expressed. A modification by base editing may be used to achieve a reduction in gene expression. In some embodiments base editor may be used to introduce a genetic modification such that the edited gene does not generate a structurally or functionally viable protein product. In some embodiments, a modification, such as the concurrent modifications described herein may comprise a genetic editing, such as base editing, such that the expression or functionality of the gene product is altered in any way. For example, the expression of the gene product may be enhanced or upregulated as compared to baseline expression levels. In some embodiments the activity or functionality of the gene product may be upregulated as a result of the base editing, or multiple base editing events acting in concert. In some embodiments, a base editor and sgRNAs that provide for multiplex editing are introduced in a single electroporation event, thereby reducing electroporation event associated toxicity. Any known methods for incorporation of exogenous genetic material into a cell may be used to replace electroporation, and such methods known in the art are contemplated for use in any of the methods described herein.

[0208] The present disclosure provides an alternative means of producing allogeneic immune cells by using base editing technology and/or a nuclease to reduce or eliminate surface HLA class-I expression and/or expression of an NK cell surface activating ligand (e.g., CD58, CD115, CD48, MICA, MICB, Nectin-2, and/or ULBP). In embodiments, base editing technology and/or a nuclease is used to reduce or eliminate activity and/or surface expression of a B2M, TAP1, TAP2, TAPBP, PDIA3, NLRC5, HLA-A, HLA-B, and/or HLA-C polypeptide. In some embodiments, at least one or more genes encoding proteins that form the peptide loading complex (PLC) (e.g., β2M, TAP1, TAP2, Tapasin) (“PLC genes”), or regulatory elements of such genes, are modified in an allogeneic immune cell with the base editing compositions and methods provided herein. In some embodiments, the PLC genes comprise or consist of B2M, TAP1, TAP2, and Tapasin. In some embodiments, the PLC genes are TAP1 and/or TAP2.

[0209] In some embodiments, the PLC genes (e.g., B2M, TAP1, TAP2, Tapasin), or regulatory elements thereof, are modified in an allogeneic immune cell in combination with one or more modifications in at least one additional gene sequence or regulatory element thereof. In some embodiments, the additional gene sequence or regulatory element is selected from TCRα Chain (TRAC), Cluster of Differentiation 58 (CD58), and Class II, Major Histocompatibility Complex Transactivator (CIITA). In some embodiments, one or more of β2M, TAP1, TAP2, and/or Tapasin encoding genes are modified in an allogeneic immune cell in combination with one or more modifications in TRAC, CD58, and/or CIITA encoding genes.

[0210] In some embodiments, PLC genes (e.g., B2M, TAP1, TAP2, Tapasin), or regulatory elements thereof, are modified in an allogeneic immune cell in combination with the overexpression of one or more inhibitory receptors. In some embodiments, the inhibitory receptors are selected from Human Leukocyte Antigen-E (HLA-E), Human Leukocyte Antigen-G (HLA-G), Programmed Death Ligand 1 (PD-L1), Cluster of Differentiation 47 (CD47), and/or Cluster of Differentiation 58. In some embodiments, one or more of β2M, TAP1, TAP2, and/or Tapasin are modified in an allogeneic immune cell in combination with the overexpression of one or more of HLA-E, HLA-G, PD-L1, CD47, and/or CD58. In some embodiments, one or more of β2M, TAP1, TAP2, Tapasin, and/or CD58 are modified in an allogeneic immune cell in combination with the overexpression of HLA-E, HLA-G, PD-L1, and/or CD47.

[0211] In some embodiments, at least one or more PLC genes (e.g., β2M, TAP1, TAP2, Tapasin, and/or CD58), or regulatory elements thereof, are modified in an allogeneic immune cell in combination with one or more modifications in at least one additional gene sequence or regulatory element thereof and with the overexpression of one or more inhibitory receptors. In some embodiments, one or more of 2M, TAP1, TAP2, and/or Tapasin, are modified in an allogeneic immune cell in combination with modifications in TRAC, CD58, and/or CIITA and with the overexpression of one or more of HLA-E, HLA-G, PD-L1, and/or CD47. In some embodiments, one or more of β2M, TAP1, TAP2, and/or Tapasin are modified in an allogeneic immune cell in combination with one or modifications in TRAC, CD58, and CIITA and with the overexpression of HLA-E, HLA-G, PD-L1, and CD47.

[0212] The modified immune cells and methods provided herein address known limitations of CAR-T therapy and is a promising development towards the next generation of precision cell-based therapies.

[0213] In embodiments, one or more genes are modified in an allogeneic immune cell so that the modified allogeneic immune cell has a reduced level of, lacks, or have virtually undetectable levels of beta-2-microglobulin and/or one or more of the following polypeptides relative to an unmodified immune cell: B cell leukemia/lymphoma 11b (Bcl11b); B cell leukemia/lymphoma 2 related protein Ald (Bcl2a1d); B cell leukemia/lymphoma 6 (Bcl6); butyrophilin-like 6 (Btn16); CD151 antigen (Cd151); chemokine (C-C motif) receptor 7 (Ccr7); discs large MAGUK scaffold protein 5 (Dlg5); erythropoietin (Epo); G protein-coupled receptor 18 (Gpr18); interferon alpha 15 (Ifna15); interleukin 6 signal transducer (Il6st); interleukin 7 receptor (I17r); Janus kinase 3 (Jak3); membrane associated ring-CH-type finger 7 (Marchf7); NCK associated protein 1 like (Nckap11); phospholipase A2, group IIF (Pla2g2f); runt related transcription factor 3 (Runx3); Signal-regulatory protein beta 1B (Sirpb1b); transforming growth factor, beta 1 (Tgfb1); tumor necrosis factor (ligand) superfamily, member 14 (Tnfsf14); tumor necrosis factor (ligand) superfamily, member 18 (Tnfsf18); tumor necrosis factor (ligand) superfamily, member 8 (Tnfsf8); zinc finger CCCH type containing 8 (Zc3h8); (Rac family small GTPase 2); (Slc4a1); 5-azacytidine induced gene 2 (Azi2); a disintegrin and metalloprotease domain 17 (Adam 17); a disintegrin and metalloprotease domain 8 (Adam8); Acetyl-CoA Acetyltransferase 1 (ACAT1); ACLY; adapter related protein complex 3 beta 1 sububit (Ap3b1); adapter related protein complex 3 delta 1 sububit (Ap3d1); adenosine A2a receptor (Adora2a); adenosine deaminase (Ada); adenosine kinase (Adk); adenosine regulating molecule 1 (Adrml); advanced glycosylation end product-specific receptor (Ager) allograft inflammatory factor 1 (Aif1); AKT1; AKT2; amyloid beta (A4) precursor protein-binding family B member 1 interacting protein (Apbblip); ankyrin repeat and LEM domain (Ankle1); annecin A1 (Anxal); arginase liver (Arg 1); arginase type II (Arg 2); AtPase Cu++ transporting, alpha polypeptide (Atp7a); autoimmune regulator (Aire); autophagy related 5 (Atg5); AXL; B and T Lymphocyte Associated (BTLA); B and T lymphocyte associated (Btla); B cell leukemia/lymphoma 10 (Bcl10); B cell leukemia/lymphoma 11a (Bcl11a); B cell leukemia/lymphoma 2 (Bcl2); B cell leukemia/lymphoma 3 (Bcl3); basic leucine zipper transcription factor, ATF-like (Batf); BCL2-associated X protein (Bax); BCL2L11; beta 2 microglobulin (B2m); BL2-associated agonist of cell dealth (Bad); BLIMP1; Bloom syndrome, RecQ like helicase (Blm); Bmi1 polycomb ring finger oncogene (Bmi1); Bone morphogenic protein 4 (Bmp4); Braf transforming gene (Braf); butyrophilin, subfamily 2, member A1 (Btn2a1); butyrophilin, subfamily 2, member A2 (Btn2a2); butyrophilin-like 1 (Btnl1); butyrophilin-like 2 (Btnl2); c-abl oncogene 1 (Abl1); c-abl oncogene 2 (Abl2); cadherin-like 26 (Cdh26); calcium channel, voltage dependent, beta 4 subunit (Cacnb4); CAMK2D; capping protein regulator and myosin 1 linker 2 (Carmil2); carcinoembryonic antigen-related cell adhesion molecule (Ceacam1); Casitas B-lineage lymphoma b (Cblb); CASP8; Caspase 3 (Casp3); caspase recruitment domain family member 11 (Card11); catenin (cadherin associated protein), beta 1 (Ctnnb1); caveolin 1 (Cav1); CBL-B; CCAAT/enhancer binding protein (C/EBP), beta (Cebpb); CCR10; CCR4; CCR5; CCR6; CCR9; CD103; CD11a; CD122; CD123; CD127; CD130; CD132; CD160 antigen (Cd160); CD161; CD19; CD1d1 antigen (Cd1d1); CD1d2 antigen (CD1d2); CD2 antigen (CD2); CD209e antigen (Cd209e); CD23; CD244 molecule A (Cd244a); CD24a antigen (Cd24a); CD27 antigen (CD27); CD274 antigen (Cd274); CD276 antigen (Cd276); CD28 antigen (Cd28); CD3 delta; CD3 epsilon; CD3 gamma; CD30; CD300A molecule (Cd300a); CD33; CD38; CD4 antigen (Cd4); CD40 ligand (Cd40lg); CD44 antigen (Cd44); CD46 antigen, complement regulatory protein (Cd46); CD47 antigen (Rh-related antigen, integrin-associated signal transducer) (Cd47); CD48 antigen (Cd48); CD5 antigen (Cd5); CD52; CD58; CD59b antigen (Cd59b); CD6 antigen (Cd6); CD69; CD7; CD70; CD74 antigen (Cd74); CD8; CD8 antigen (Cd8); CD80 antigen (Cd80); CD81 antigen (Cd81); CD82; CD83 antigen (Cd83); CD86; CD86 antigen (Cd86); CD8A; CD96; CD99; CDK4; CDK8; CDKN1B; chemokine (C motif) ligand 1 (Xcl1); chemokine (C-C motif) ligand 19 (Ccl19); chemokine (C-C motif) ligand 2 (Ccl2); chemokine (C-C motif) ligand 20 (Ccl20); chemokine (C-C motif) ligand 5 (Ccl5); chemokine (C-C motif) receptor 2 (Ccr2); chemokine (C-C motif) receptor 6 (Ccr6); chemokine (C-C motif) receptor 9 (Ccr9); chemokine (C-X-C motif) ligand 12 (Cxcl12); chemokine (C-X-C motif) receptor (Cxcr4); Chitinase 3 Like 1 (Chi311); cholinergic receptor, nicotinic, alpha polypeptide 7 (Chrna7); chromodomain helicase DNA binding protein 7 (Chd7); CLA; Class II Major Histocompatibility Complex Transactivator (CIITA); cleft lip and palate associated transmembrane protein 1 (Clptm1); Cluster of Differentiation 123 (CD123); Cluster of Differentiation 3 (CD3); Cluster of Differentiation 33 (CD33); Cluster of Differentiation 52 (CD52); Cluster of Differentiation 7 (CD7); Cluster of Differentiation 96 (CD96); coagulation factor II (thrombin) receptor-like 1 (F2rl1); coil-coil domain containing 88B (Ccdc88b); core-binding factor beta (Cbfb); coronin, actin binding protein 1A (Corola); coxsackie virus and adenovirus receptor (Cxadr); CS-1; CSF2CSK; c-src tyrosine kinase (Csk); C-type lectin domain family 2, member i (Clec2i); C-type lectin domain family 4, member a2 (Clec4a2); C-type lectin domain family 4, member d (Clec4d); C-type lectin domain family 4, member e (Clec4e); C-type lectin domain family 4, member f (Clec4f); C-type lectin domain family 4, member g (Clec4g); CUL3; CXCR3; cyclic GMP-AMP synthase (Cgas); cyclin D3 (Ccnd3); cyclin dependent kinase inhibitor 2A (Cdkn2a); cyclin-dependent kinase (Cdk6); CYLD lysine 63 deubiquitinase (Cyld); cysteine-rich protein 3 (Crip3); cytidine 5′-triphosphate synthase (Ctps); Cytochrome P450 Family 11 Subfamily A Member 1 (Cyp11a1); cytochrome P450, family 26, subfamily b, polypeptide (Cyp26b1); Cytokine Inducible SH2 Containing Protein (CISH); cytotoxic T lymphocyte-associated protein 2 alpha (Ctla2a); Cytotoxic T-Lymphocyte Associated Protein 4 (CTLA-4); DCK; dedicator of cytokinesis 2 (Dock2); dedicator of cytokinesis 8 (Dock8); delta like canonical Notch ligand 4 (Dll14); deltex 1, E3 ubiquitin ligase (Dtx1); deoxyhypusine synthase (Dhps); DGKA; DGKZ; DHX37; dicer 1, ribonuclease type III (Dicer1); dipeptidylpeptidase 4 (Dpp4); discs large MAGUK scaffold protein 1 (Dlg1); DnaJ heat shock protein family (Hsp40) member A3 (Dnaja3); dolichyl-di-phosphooligosaccharide-protein glycotransferase (Ddost); double homeobox B-like 1 (Duxbl1); drosha, ribonuclease type III (Drosha); dual specificity phosphatase 10 (Dusp10); dual specificity phosphatase 22 (Dusp22); dual specificity phosphatase 3 (Dusp3); E74-like factor 4 (Elf4); early growth response 1 (Egr1); early growth response 3 (Egr3); ELOB (TCEB2); ENTPD1 (CD39); eomesodermin (Eomes); Eph receptor B4 (Ephb4); Eph receptor B6 (Ephb6); ephrin B1 (Efnb1); ephrin B2 (Efnb2); ephrin B3 (Efnb3); Epstein-Barr virus induced gene 3 (Ebi3); erb-b2 receptor tyrosine kinase (Erbb2); eukaryotic translation initiation factor 2 alpha kinase 4 (Eif2ak4); FADD; family with sequence similarity 49, member B (Fam49b); Fanconi anemia, complementation group A (Fanca); Fanconi anemia, complementation group D2 (Fancd2); Fas (TNF receptor superfamily member 6) (Fas); Fas (TNFRSF6)-associated via death domain (Fadd); Fas Cell Surface Death Receptor (FAS); Fc receptor, IgE, high affinity I, gamma polypeptide (Fcer1g); fibrinogen-like protein 1 (Fgl1); fibrinogen-like protein 2 (Fgl2); FK506 binding protein 1a (Fkbp1a); FK506 binding protein 1b ((Fkbp1b); flotillin 2 (Flot2); FMS-like tyrosine kinase (Flt3); forkhead box J1 (Foxj1); forkhead box N1 (Foxn1); forkhead box P1 (Foxp1); forkhead box P3 (Foxp3); frizzled class receptor 5 (Fzd5); frizzled class receptor 7 (Fzd7); frizzled class receptor 8 (Fzd8); fucosyltransferase 7 (Fut7); Fyn proto-oncogene (Fyn); gap junction protein, alpha 1 (Gja1); GATA binding protein 3 (GATA3); GCN2 kinase (IDO pathway); gelsolin (Gsn); GLI-Kruppel family member GLI3 (Gli3); glycerol-3-phosphate acyltransferase, mitochondrial (Gpam); growth arrest and DNA-damage-inducible 45 gamma (Gadd45g); GTPase, IMAP family member 1 (Gimap1); HITET2; H2.0-like homeobox (Hlx); haematopoietic 1 (hem1); HCLS1 binding protein 3 (Hs1bp3); heat shock 105 kDa/110 kDa protein 1 (Hsph1); heat shock protein 1 (chaperonin) (Hspd1); heat shock protein 90, alpha (cytosolic), class A member 1 (Hsp90aal); hematopoietic SH2 domain containing (Hsh2d); hepatitis A virus cellular receptor 2 (Havcr2); hes family bHLH transcription factor 1 (Hes1); histocompatibility 2, class II antigen A, alpha (H2-Aa); histocompatibility 2, class II antigen A, beta 1 (H2-Ab1); histocompatibility 2, class II, locus DMa (H2-DMa); histocompatibility 2, M region locus 3 (H3-M3); histocompatibility 2, O region alpha locus (H2-Oa); histocompatibility 2, T region locus 23 (H2-T23); HLA-DR; homeostatic iron regulator (Hfe); icos ligand (Icosl); IKAROS family zinc finger 1 (Ikzf1); IL10; IL10RA; IL2 inducible T cell kinase (Itk); IL6R; Indian hedgehog (Ihh); indoleamine 2,3-dioxygenase 1 (Ido1); inducible T cell co-stimulator (Icos); inositol 1,4,5-trisphosphate 3-kinase B (Itpkb); insulin II (Ins2); insulin-like growth factor 1 (Igf1); insulin-like growth factor 2 (Igf2); insulin-like growth factor binding protein 2 (Igfbp2); integrin alpha L (Itgal); integrin alpha M (Itgam); integrin alpha V (Itgav); integrin alpha X (Itgax); integrin beta 2 (Itgb2); integrin, alpha D (Itgad); intercellular adhesion molecule 1 (Icam1); interferon (alpha and beta) receptor 1 (Ifnar1); interferon alpha 1 (Ifna1); interferon alpha 11 (Ifna11); interferon alpha 12 (Ifna12); interferon alpha 13 (Ifna13); interferon alpha 14 (Ifna14); interferon alpha 16 (Ifna16); interferon alpha 2 (Ifna2); interferon alpha 4 (Ifna4); interferon alpha 5 (Ifna5); interferon alpha 6 (Ifna6); interferon alpha 7 (Ifna7); interferon alpha 9 (Ifna9); interferon alpha B (Ifnab); interferon beta 1 (Ifnb1); interferon gamma (Ifng); interferon kappa (Ifnk); interferon regulatory factor 1 (Irf1); interferon regulatory factor 4 (Irf4); interferon zeta (Ifnz); interleukin 1 beta (Il1b; interleukin 1 family, member 8 (Il1f8); interleukin 1 receptor-like 2 (Il1r12); interleukin 12 receptor, beta1 (Il12rb1); interleukin 12a (Il12a); interleukin 12b (Il12b); interleukin 15 (Il15); interleukin 18 (Il18); interleukin 18 receptor 1 (Il18r1); interleukin 2 (112); interleukin 2 receptor, alpha chain (Il2ra); interleukin 2 receptor, gamma chain (Il2rg); interleukin 20 receptor beta (I120rb); interleukin 21 (I121); interleukin 23, alpha subunit p19 (Il23a); interleukin 27 (I127); interleukin 4 (Il4); interleukin 4 receptor, alpha (Il4ra); interleukin 6 (I16); interleukin 7 (I17); IRF8; itchy, E3 ubiquitin protein ligase (Itch); jagged 2 (Jag2); jumonji domain containing 6 (Jmjd6); JUNB; junction adhesion molecule like 9 (Jam9); K (lysine) acetyltransferase 2A (Kat2a); KDEL (Lys-Asp-Glu-Leu) endoplasmic reticulum protein retention receptor 1 (Kdelr1); KIT proto-oncogene receptor tyrosine kinase (Kit); LAG-3; LAIR-1 (CD305); LDHA; lectin, galactose binding, soluble 1 (Lgals1); lectin, galactose binding, soluble 3 (Lgals3); lectin, galactose binding, soluble 8 (Lgals8); lectin, galactose binding, soluble 9 (Lgals9); leptin (Lep); leptin receptor (Lepr); leucine rich repeat containing 32 (Lrrc32); leukocyte immunoglobulin-like receptor, subfamily B, member 4A (Lilrb4a); LFNG O-fucosylpeptide 3-beta-N-acetylglucosaminyltransferase (Lfng); LIF; ligase IV, DNA, ATP-dependent (Lig4); LIM domain only 1 (Lmo1); limb region 1 like (Lmbr1); linker for activation of T cells (Lat); lymphocyte antigen 9 (Ly9); lymphocyte cytosolic protein 1 (Lcp1); lymphocyte protein tyrosine kinase (Lck); lymphocyte transmembrane adaptor 1 (Lax1); lymphocyte-activation gene 3 (Lag3); lymphoid enhancer binding factor 1 (Lef1); LYN; lysyl oxidase-like 3 (Lox13); MAD1 mitotic arrest deficient 1-like 1 (Mad111); MALTI paracaspase (Malt1); MAP4K4; MAPK14; MCJ; mechanistic target of rapamycin kinase (Mtor); MEF2D; Methylation-Controlled J Protein (MCJ); methyltransferase like 3 (Mett13); MGAT5; MHC I like leukocyte 2 (Mill2); midkine (Mdk); mitogen-activated protein kinase 8 interacting protein 1 (Mapk8ip10); moesin (Msn); myelin protein zero-like 2 (Mpzl2); myeloblastosis oncogene (Myb); myosin, heavy polypeptide 9, non-muscle (Myh9); Nedd4 family interacting protein 1 (Ndfip1); neural precursor cell expressed, developmentally down-regulated 4 (Nedd4); NFATc1; NFATC2; NFATC4; NFKB activating protein (Nkap); nicastrin (Ncstn); NK2 homeobox 3 (Nkx2-3); NLR family, CARD domain containing 3 (Nlrc3); NLR family, pyrin domain containing 3 (Nlrp3); non-catalytic region of tyrosine kinase adaptor protein 1 (Nck1); non-catalytic region of tyrosine kinase adaptor protein 2 (Nck2); non-homologous end joining factor 1 (Nhej1); non-SMC condensin II complex, subunit H2 (Ncaph2); Notch-regulated ankyrin repeat protein (Nrarp); NT5E (CD73); nuclear factor of activated T cells, cytoplasmic, calcineurin dependent (Nfatc3); nuclear factor of kappa light polypeptide gene enhancer in B cells inhibitor, delta (Nfkbid); nuclear receptor co-repressor 1 (Ncor1); Nuclear Receptor Subfamily 4 Group A Member 1 (NR4A1); Nuclear Receptor Subfamily 4 Group A Member 2 (NR4A2); Nuclear Receptor Subfamily 4 Group A Member 3 (NR4A3); ODC1; OTU domain containing 5 (Otud5); OTULINL (FAM105A); paired box 1 (Pax1); PDCD1 (PD1; PD-1); PDIA3; pellino 1 (Peli1); peroxiredoxin 2 (Prdx2); PHD1 (EGLN2); PHD2 (EGLN1); PHD3 (EGLN3); phosphodiesterase 5A, cGMP-specific (Pde5a); phosphoinositide-3-kinase regulatory subunit (Pik3r6); phospholipase A2, group IIA (Pla2g2a); phospholipase A2, group IID (Pla2g2d); phospholipase A2, group IIE (Pla2g2e); phosphoprotein associated with glycosphingolipid microdomains 1 (Pag1); PIK3CD; PIKFYVE; POZ (BTB) and AT hook containing zinc finger 1 (Patz1); PPARa; PPARd; PR domain containing 1, with ZNF domain (Prdm1); presenilin 1 (Psen1); presenilin 2 (Psen2); PRKACA; PRKC, apoptosis, WT1, regulator (Pawr); programmed cell death 1 ligand 2 (Pdcd11g2); prosaposin (Psap); prostaglandin E receptor 4 (subtype EP4) (Ptger4); protein kinase C, theta 2 (Prkcq); protein kinase C, zeta (Prkcz); protein kinase, cAMP dependent regulatory, type I, alpha (Prkarla); protein kinase, DNA activated, catalytic polypeptide (Prkdc); protein phosphatase 3, catalytic subunit, beta isoform (Ppp3cb); protein tyrosine phosphatase, non-receptor type 2 (Ptpn2); protein tyrosine phosphatase, non-receptor type 22 (lymphoid) (Ptpn22); protein tyrosine phosphatase, non-receptor type 6 (Ptpn6); protein tyrosine phosphatase, receptor type, C (Ptprc); PTEN; PTPN11; purine-nucleoside phosphorylase (Pnp); purinergic receptor P2X, ligand-gated ion channel, 7 (P2rx7); PVR Related Immunoglobulin Domain Containing (PVRIG; CD112R); PYD and CARD domain containing 7 (Pycard); RAB27A, member RAS oncogene family (Rab27a); RAB29, member RAS oncogene family (Rab29); radical S-adenosyl methionine domain containing 2 (Rsad2); RAR-related orphan receptor alpha (Rora); RAR-related orphan receptor gamma (Ror); RAS guanyl releasing protein 1 (Rasgrp1); ras homolog family member A (Rhoa); ras homolog family member H (Rhoh); RAS protein activator like 3 (Rasal3); RASA2; receptor (TNFRSF)-interacting serine-threonine kinase 2 (Ripk2); recombination activating gene 1 (Rag1); recombination activating gene 2 (Rag2); Regulatory Factor X Associated Ankyrin Containing Protein (RFXANK); RHO family interacting cell polarization regulator 2 (Ripor2); ribosomal protein L22 (Rpl 22); ribosomal protein S6 (Rps6); RING CCCH (C3H) domains 1 (Rc3h1); ring finger and CCCH-type zinc finger domains 2 (Rc3h2); RNF2; runt related transcription factor 1 (Runx1); runt related transcription factor 2 (Runx2); SAM and SH3 domain containing 3 (Sash3); schlafen 1; Selectin P Ligand/P-Selectin Glycoprotein Ligand-1 (SELPG/PSGL1) polypeptide; selenoprotein K (Selenok); sema domain immunoglobulin domain (Ig), transmembrane domain (TM) and short cytoplasmic domain, (semaphorin) 4A (Sema4a); serine/threonine kinase 11 (Stk11); SH3 domain containing ring finger 1 (Sh3rf1); SHP1; sialophorin (Spn); SIGLEC15; signal transducer and activator of transcription 3 (Stat3); signal transducer and activator of transcription 5A (Stat5A); signal transducer and activator of transcription 5B (Stat5B); signal-regulatory protein alpha (Sirpa); Signal-regulatory protein beta 1A (Sirpb1a); Signal-regulatory protein beta 1C (Sirpb1c); SLA; SLAM family member 6 (Slamf6); SLAMF7; SMAD family member 3 (Smad3); SMAD family member 7 (Smad7); SMARCA4; solute carrier family 11 (proton-coupled divalent metal ion transporters), member 1 (Slc11a1); solute carrier family 4 (anion exchanger), member 1; solute carrier family 46, member 2 (Slc46a2); sonic hedgehog (Shh); SOS Ras/Rac guanine nucleotide exchange factor 1 (Sos1); SOS Ras/Rac guanine nucleotide exchange factor 2 (Sos2); special AT-rich sequence binding protein 1 (Satb1); spleen tyrosine kinase (Syk); Sprouty RTK Signaling Antagonist 1 (Spry1); Sprouty RTK Signaling Antagonist 2 (Spry2); squamous cell carcinoma antigen recognized by T cells (Sart1); src homology 2 domain-containing transforming protein B (Shb); Src-like-adaptor 2 (Sla2); SRY (sex determining region Y)-box 4 (Sox4); STK4; suppression inducing transmembrane adaptor 1 (Sit1); suppressor of cytokine signaling 1 (Socs1); suppressor of cytokine signaling 5 (Socs5); suppressor of cytokine signaling 6 (Socs6); surfactant associated protein D (Sftpd); SUV39; syndecan 4 (Sdc4); syntaxin 11 (Stx11); T Cell Immunoglobulin Mucin 3 (Tim-3); T cell immunoreceptor with Ig and ITIM domains (Tigit); T cell receptor alpha joining 18 (Traj18); T Cell Receptor Beta Constant 1 (TRBC1); T Cell Receptor Beta Constant 2 (TRBC2); T cell, immune regulator 1, ATPase, H+ transporting, lysosomal V0 protein A3 (Tcirg1); T cell-interacting, activating receptor on myeloid cells 1 (Tarm1); T-box 21 (Tbx21); TCR; TCR alpha; TCR beta; TCR complex gene sequence; Tet Methylcytosine Dioxygenase 2 (TET2); TGFbRII; TGFbRII (TGFBR2); three prime repair exonuclease 1 (Trex1); thymocyte selection associated (Themis); thymus cell antigen 1, theta (Thyl); TMEM222; TNF receptor-associated factor 6 (Traf6); TNFAIP3; TNFRSF10B; TNFRSF8 (CD30); TOX; TOX2; TRAC; transformation related protein 53 (Trp53); Transforming Growth Factor Beta Receptor II (TGFbRII); transforming growth factor, beta receptor II (Tgfbr2); transmembrane 131 like (Tmem1311); transmembrane protein 98 (Tmem98); triggering receptor expressed on myeloid cells-like 2 (Trem12); TSC complex subunit 1 (Tsc1); tumor necrosis factor (ligand) superfamily, member 11 (Tnfsf11); tumor necrosis factor (ligand) superfamily, member 13b (Tnfsf13b); tumor necrosis factor (ligand) superfamily, member 4 (Tnfsf4); tumor necrosis factor (ligand) superfamily, member 9 (Tnfsf9); tumor necrosis factor receptor superfamily, member 13c (Tnfrsf13c); tumor necrosis factor receptor superfamily, member 4 (Tnfrsf4); tumor necrosis factor, alpha-induced protein 8-like 2 (Tnfalp812); twisted gastrulation BMP signaling modulator 1 (Twsg1); UBASH3A; vanin 1 (Vnn1); vascular cell adhesion molecule 1 (Vcam1); VHL; v-maf musculoaponeurotic fibrosarcoma oncogene family, protein B (avian) (Mafb); V-set and immunoglobulin domain containing 4 (Vsig4); V-Set Immunoregulatory Receptor (VISTA); WD repeat and FYVE domain containing 4 (Wdfy4); wingless-type MMTV integration site family, member 1 (Wnt1); wingless-type MMTV integration site family, member 4 (Wnt4); WNT signaling pathway regulator (Apc); WW domain containing E3 ubiquitin protein ligase 1 (Wwp1); XBP1; YAP1; ZAP70; ZC3H12A; zfp35; zinc finger and BTB domain containing 1 (Zbtb1); zinc finger and BTB domain containing 7B (Zbtb7B); zinc finger CCCH type containing 12A (Zc3h12a); zinc finger CCCH type containing 12D (Zc3h12d); zinc finger E-box binding homeobox 1 (Zeb1); zinc finger protein 36, C3H type (Zfp36); zinc finger protein 36, C3H type-like 1 (Zfp36L1); zinc finger protein 36, C3H type-like 2 (Zfp36L2); and zinc finger protein 683 (Zfp683).

### HLA Single Chain Dimers and Trimers

[0214] The present disclosure provides human leukocyte antigen (HLA) single chain dimers and trimers (e.g., HLA class-I single-chain dimers and trimers). In some embodiments, the HLA single chain dimers comprise an HLA-A, -B, -C, and/or -E domain (see, e.g., Table 8A and Example 2) and a beta-2-microglobulin domain. In some instances, the HLA single chain trimers comprise an HLA-A, -B, -C, and/or -E domain (see, e.g., Table 8A and Example 2), a beta-2-microglobulin domain, and a cognate peptide (cPep). In some embodiments, the HLA construct is membrane-bound (e.g., the HLA single-chain dimer or trimer contains a transmembrane domain, such as a transmembrane domain derived from CD4) or the HLA single-chain dimer or trimer is secreted by a cell. Expression of the HLA class-I single-chain dimers or trimers in an immune cell (e.g., a β2M knock-out (KO) immune cell) results in increased resistance to lysis by alloreactive T cells. In some instances, a modified immune cell expressing an HLA single chain dimer or trimer includes modifications to reduce or eliminate endogenous expression of β2M.

[0215] In some instances, the HLA heavy chain domain (e.g., HLA-C) contains an A73T amino acid alteration. In some embodiments, the A73T alteration broadens the number of NK cell inhibitory receptors to which an HLA heavy chain domain (e.g., HLA-C) binds.

[0216] The various domains of an HLA construct can be connected by linkers, such as those provided herein. The length of the linkers may be elongated or truncated by about or at least about 1, 2, 3, 4, 5, 6, 7, 8, 9, 10, 15, 20, 25, 30, 35, 40, 45, or 50 amino acids. In various instances, the linker is a Gly/Ser-linker (GS-linker). The length of the linkers may be about, at least about, or no more than about 1, 2, 3, 4, 5, 6, 7, 8, 9, 10, 15, 20, 25, 30, 35, 40, 45, 50, 75, or 100 amino acids.

[0217] In some instances, the HLA construct comprises an N-terminal signal peptide (e.g., a β2M signal peptide). Any signal peptide known in the art and suitable for secretion and/or membrane-localization of a polypeptide is suitable in the HLA single chain dimers or trimers provided herein.

[0218] In some instances, the HLA single chain dimer or trimer contains a transmembrane domain (e.g., a Type I or Type II transmembrane domain; a CD4 transmembrane domain; an HLA heavy chain transmembrane domain, such as a heterologous HLA heavy chain transmembrane domain), optionally at an N-terminal or C-terminal portion thereof. In some embodiments, the HLA single chain dimer or trimer contains a Type II transmembrane domain. In some instances, the HLA-A, -B, -C, or -E domain is derived from an HLA-A, -B, -C, or -E polypeptide from which a transmembrane domain has been deleted. In some instances, the HLA single-chain dimer or trimer contains a wild-type HLA heavy chain transmembrane domain. As described in Chou and Elrod, Proteins: Structure, Function, and Genetics 34:137-153 (1999), a Type I membrane protein is a single-pass transmembrane protein having an extracellular (or luminal) N-terminus and a cytoplasmic C terminus for a cell (or organelle) membrane, and a Type I membrane protein is a single-pass transmembrane protein having an extracellular (or luminal) C-terminus and a cytoplasmid N-terminus for a cell (or organelle) membrane.

[0219] In embodiments, an HLA construct contains any one or more of the domains described in Table 8A and/or in Example 2, functional fragments thereof, or extensions thereof, where the functional fragment may correspond to an N-terminal and/or C-terminal truncation by about, at least about, and/or no more than about 1, 2, 3, 4, 5, 6, 7, 8, 9, 10, 15, 20, or 25 amino acids, and where the extension may correspond to an N-terminal and/or C-terminal extension by about, at least about, and/or no more than about 1, 2, 3, 4, 5, 6, 7, 8, 9, 10, 15, 20, or 25 amino acids.

[0220] In some embodiments, the HLA single-chain dimer contains one of the following domain arrangements from N-terminus to C-terminus: signal peptide-β2M domain-linker-HLA heavy chain (HLA-X) domain; signal peptide-β2M domain-linker-HLA-X domain-transmembrane domain; transmembrane domain-HLA-X domain-linker-β2M domain; transmembrane domain-β2M domain-HLA-X domain; where HLA-X is an HLA-A, HLA-B, HLA-C, or HLA-E domain. In some embodiments, the HLA single-chain trimer contains one of the following domain arrangements from N-terminus to C-terminus: signal peptide-cPep-linker-β2M domain-linker-HLA-X domain; signal peptide-cPep-linker-β2M domain-linker-HLA-X domain-transmembrane domain; where HLA-X is an HLA-A, HLA-B, HLA-C, or HLA-E domain). In some instances, any one of these domain arrangements can be modified to not include any β2M domain.

[0221] Non-limiting examples of cognate peptide (cPep) amino acid sequences include those listed in Tables A and 8A. In some cases, the cPep assists in trimerization of a HLA single-chain trimer. In various instances, trimerization of the HLA single-chain trimer increases inhibition of lysis of a cell by an NK cell.

TABLE A
Representative cPep amino acid sequences.

| | SEQ ID | |
|---|---|---|
| Sequence | NO: | Protein of Origin |
| IIDKSGSTV | 631 | AP-3 complex subunit mu-1 |
| VGDKPVSNF | 632 | Protein unc-119 homolog B |
| AVDGSGTKF | 633 | Ribosome biogenesis protein WDR12 |
| IVDRGSTNL | 634 | Alpha-adducin |
| YVDEHGTRL | 635 | Proteasome subunit beta type-8 |
| GSDPRVTQL | 636 | RILP-like protein 2 |
| IVDRPVTLV | 637 | NADH dehydrogenase [ubiquinone] 1 beta subcomplex |
| | | subunit 10 |
| IVDKSGRTL | 638 | Methionine synthase |
| AGDDAPRAV | 639 | β-Actin or POTE ankyrin domain family member F |
| VSDOANHVL | 640 | Kinesin-like protein KIF21A |
| ASDHAPHTL | 641 | CAD protein |
| VGDPHTVTV | 642 | Bromodomain-containing protein 8 |
| KSDERPVHI | 643 | E3 ubiquitin-protein ligase TRIM33 |
| ASDDGTVRI | 644 | WD repeat-containing protein 26 |
| SIDKTGENF | 645 | 40S ribosomal protein S4, X isoform X isoform |
| TSDDVAKEF | 646 | Protein unc-13 homolog C |
| SADSKPIDV | 647 | Aminoacyl tRNA synthase complex-interacting |
| | | multifunctional protein 1 |
| KLDETGNSL | 648 | DNA topoisomerase 2-alpha |
| MADRGEARL | 649 | RecQ-mediated genome instability protein 2 |
| AADFEIGHF | 650 | Nucleosome assembly protein 1-like 1 |
| NADGKIISL | 651 | Bifunctional glutamate/proline-tRNA ligase |
| AADGKGVVV | 652 | 60S ribosomal protein L28 |
| AADKIHSSF | 653 | Plasminogen activator inhibitor 2 |
| NADAIVVKL | 654 | Staphylococcal nuclease domain-containing protein 1 |
| NADTVSSKL | 655 | AP-2 complex subunit beta |
| SAEKAPVSV | 656 | Transforming acidic coiled-coil-containing protein 1 |
| QGDAVVLKI | 657 | Immunoglobulin superfamily member 8 precursor |
| AADHYSQQM | 658 | Guanylate-binding protein 4 |

[0222] The transmembrane domain traverses a cell's lipid bilayer cellular membrane. In some embodiments, this domain is derived from a receptor (e.g., an antigen receptor) having a transmembrane domain, while in other embodiments, this domain is synthetic. In some cases, the transmembrane domain is an HLA-A, -B, -C, or -E transmembrane domain (e.g., a wild-type HLA-A, -B. -C, or -E transmembrane domain). In some embodiments, the transmembrane domain may be derived from a non-human transmembrane domain and, in some embodiments, humanized. By “humanized” is meant having the sequence of the nucleic acid encoding the transmembrane domain optimized such that it is more reliably or efficiently expressed in a human subject. In some embodiments, the transmembrane domain is derived from another transmembrane protein expressed in a human immune effector cell. Examples of such proteins include, but are not limited to, subunits of the T cell receptor (TCR) complex, PD1, or any of the Cluster of Differentiation proteins (e.g., CD4), or other proteins, that are expressed in the immune effector cell and that have a transmembrane domain. In some embodiments, the transmembrane domain will be synthetic, and such sequences will comprise many hydrophobic residues.

[0223] Transmembrane domains for use in the disclosed HLA constructs can include at least the transmembrane region(s) of) the alpha, beta or zeta chain of the T-cell receptor, CD28, CD3 epsilon, CD45, CD4, CD5, CD8, CD9, CD16, CD22, CD33, CD37, CD64, CD80, CD86, CD134, CD137, CD154. In some embodiments, the transmembrane domain is derived from CD4, CD8a, CD28 and CD35.

[0224] In embodiments, the HLA single-chain dimers and trimers further comprise an effector domain that functions to improve inhibition of alloreactive T cells and/or NK cells. The HLA single chain dimers and trimers fused to the effector domain can be referred to as “functionalized” single-chain dimers or trimers. In some cases, the effector domain is fused to the N-terminus or C-terminus of a HLA single-chain dimer or trimer. Non-limiting examples of effector domains include PD-L1 or CTLA4 extracellular domains or a CD47 polypeptide. Further non-limiting examples of effector domains include additional single-chain dimers or trimers, which in some instances do not contain any transmembrane domain. In some instances, the effector domain is a membrane-bound domain or a transmembrane domain. If the effector domain is a transmembrane domain or contains a transmembrane domain, it can be advantageous to delete a transmembrane domain from the HLA single-chain dimer or trimer to which the effector domain is fused (e.g., delete a transmembrane domain from the HLA heavy-chain domain). In some cases, the effector domain is fused to the single-chain dimer or trimer via a linker peptide.

[0225] In some embodiments, the fusion polypeptide further comprises a tag or marker (e.g., a fluorescent protein, such as green fluorescent protein, a His tag, or a FLAG tag). Non-limiting examples of peptide tags include an ALFA-tag, an AviTag, a C-tag, a Calmodulin-tag, an iCap Tag™, a polyglutamate tag, a polyarginine tag, an E-tag, a FLAG-tag, an HA-tag, a His-tag, a Myc-tag, an NE-tag, a RHO1D4-tag, an S-tag, an SBP-tag, a Softag 1, a Softag 3, a Spot-tag, a Strep-tag, a T7-tag, a Ty-tag, a TC-tag, a V5-tag, a VSV-tag, an Xpress-tag, Isopeptag, Spy Tag, SnoopTag, DogTag, SdyTag, BCCP, a glutathione-S-transferase-tag, a GFP-tag, a HaloTag, a SNAP-tag, a CLIP-tag, a HUH-tag, a maltose-binding protein-tag, a Nus-tag, a thioredoxin-tag, an Fc-tag, and a carbohydrate recognition domain tag.

### Modified Cells

[0226] The present disclosure provides cells (e.g., T- or NK-cells, or any cell suitable for use in regenerative medicine, solid-organ transplant, or treatment of an autoimmune disease) modified using nucleobase editors and/or nucleases described herein. The modified immune cells may express chimeric antigen receptors (CARs) (e.g., CAR-T cells). In embodiments, the modified immune cells express an HLA single-chain dimer or trimer construct (e.g., those described above, listed in Table 8A, and/or described in Example 2). Modification of immune cells to express a chimeric antigen receptor can enhance an immune cell's immunoreactive activity, wherein the chimeric antigen receptor has an affinity for an epitope on an antigen, wherein the antigen is associated with an altered fitness of an organism. For example, the chimeric antigen receptor can have an affinity for an epitope on a protein expressed in a diseased cell. Because the CAR-T cells can act independently of major histocompatibility complex (MHC), activated CAR-T cells can kill the diseased cell expressing the antigen. The direct action of the CAR-T cell evades defensive mechanisms that have evolved in response to MHC presentation of antigens to immune cells. Some embodiments comprise autologous immune cell immunotherapy, wherein immune cells are obtained from a subject having a disease or altered fitness characterized by cancerous or otherwise altered cells expressing a surface marker. The obtained immune cells are genetically modified to express a chimeric antigen receptor and are effectively redirected against specific antigens. Thus, in some embodiments, immune cells are obtained from a subject in need of CAR-T immunotherapy. In some embodiments, these autologous immune cells are cultured and modified shortly after they are obtained from the subject. In other embodiments, the autologous cells are obtained and then stored for future use. This practice may be advisable for individuals who may be undergoing parallel treatment that will diminish immune cell counts in the future. Some embodiments comprise allogeneic immune cell immunotherapy. In allogeneic immune cell immunotherapy, immune cells are obtained from a donor other than the subject who will be receiving treatment. In some embodiments, immune cells are obtained from a healthy subject or donor and are genetically modified to express a chimeric antigen receptor and are effectively redirected against specific antigens. The immune cells, after modification to express a chimeric antigen receptor (CAR), are administered to a subject for treating a disease. In some embodiments, immune cells to be modified to express a chimeric antigen receptor (CAR) can be obtained from pre-existing stock cultures of immune cells.

[0227] Non-limiting examples of cells suitable for use in embodiments of the disclosure include, but are not limited to, the following cell types or progenitors thereof: bone cells (e.g., osteoblasts, osteoclasts, osteocytes, and lining cells), cartilage cells (e.g., chondrocytes), endothelial cells, epithelial cells, fat cells (e.g., white or brown adipocytes), muscle cells (e.g., skeletal, cardiac, or smooth muscle cells), nerve cells (e.g., neurons or neuroglial cells), platelets, red blood cells (e.g., erythrocytes), sex cells (e.g., spermatozoa or ova), skin cells (e.g., keratinocytes, melanocytes, Merkel cells, or Langerhans cells), stem cells (e.g., embryonic stem cells or adult stem cells), and white blood cells (e.g., granulocytes such as neutrophils, eosinophils, or basophils, or agranulocytes such as monocytes or lymphocytes). Non-limiting examples of cells suitable for use in embodiments of the disclosure also include, but are not limited to, the following cell types or progenitors thereof: bone marrow cells, vascular endothelial cells, hepatocytes, neurons, glia, bronchial endothelial cells, epidermal cells, respiratory interstitial cells, adipocytes, and dermal fibroblasts. Non-limiting examples of cells suitable for use in embodiments of the disclosure also include, but are not limited to, the following cell types or progenitors thereof: Endothelial cells, Adrenergic neural cells, Alpha cells, Ameloblast, Anterior lens epithelial cells, Apocrine sweat gland cells, Astrocytes, Auditory inner hair cells of organ of Corti, Auditory outer hair cells of organ of Corti, B cells, Bartholin's gland cells, basal cells (stem cells), Basal cells of olfactory epithelium, Basket cells, Basophil granulocyte, Beta cells, Betz cells, Bone marrow reticular tissue fibroblasts, Border cells of organ of Corti, Boundary cells, Bowman's gland cells, Brown fat cells, Brunner's gland cells, Brunner's gland cells, Bulbourethral gland cells, Bushy cells, Cajal-Retzius cells, Cardiac muscle cells, Cartwheel cells, cells of the Zona fasciculata, cells of the Zona glomerulosa, cells of the Zona reticularis, Cementoblast cells, Centroacinar cells, Ceruminous gland cells, Chandelier cells, Chemoreceptor glomus cells of carotid body cells, Chief cells, Cholinergic neuron cells, Chromaffin cells, Club cells, Cold-sensitive primary sensory neurons, Connective tissue macrophage, Corneal fibroblasts, Corpus luteum cells, Cortical hair shaft cells, Corticotropes, Crystallin-containing lens fiber cells, Cuticular hair shaft cells, Cytotoxic T cells, D cells, Delta cells, Dendritic cells, Double-bouquet cells, Duct cells, Eccrine sweat gland clear cells, Eccrine sweat gland dark cells, Efferent ducts cells, Elastic cartilage chondrocyte, Enteric glial cells, Enterochromaffin cells, Enterochromaffin-like cells, Eosinophil granulocyte, Epidermal basal cells, Epidermal Langerhans cells, Epididymal basal cells, Epididymal principal cells, Epithelial reticular cells, Epsilon cells, Erythrocytes, Fibrocartilage chondrocyte, Fork neurons, Foveolar cells, G cells, Gall bladder epithelial cells, Gland of Littre cells, Gland of Moll cells in eyelid, Golgi cells, Gonadotropes, Granule cells, Granulosa cells, Granulosa lutein cells, Grid cells, Head direction cells, Heat-sensitive primary sensory neurons, Helper T cells, Hematopoietic stem cells and committed progenitors for the blood and immune system (various types), Henle's layer hair root sheath cells, Hensen's cells of organ of Corti, Hepatic stellate cells (Ito cells), Huxley's layer hair root sheath cells, Hyaline cartilage chondrocytes, Hyalocytes, I cells, Inner hair cells of vestibular system of ear, Inner phalangeal cells of organ of Corti, Inner pillar cells of organ of Corti, Insulated goblet cells, Intercalated cells, Intercalated duct cells, Intercalated duct cells, Intermediate skeletal muscle cells, Interstitial kidney cells, Intestinal brush border cells (with microvilli), Juxtaglomerular cells, K cells, Keratinocyte, Kidney distal tubule cells, L cells, Lacrimal gland cells, Lactiferous duct cells, Lactotropes, Leydig cells, Liver lipocyte, Loop of Henle thin segment cells, Loose connective tissue fibroblasts, Lugaro cells, Macula densa cells, Magnocellsular neurosecretory cells, Mammary gland cells, Martinotti cells, Mast cells, Medium spiny neurons, Medullary hair shaft cells, Megakaryocyte, Melanocyte, Melanotropes, Merkel cells of epidermis, Mesangial cells, Microglial cells, Mo cells (or M cells), Monocytes, Myoepithelial cells, Myosatellite cells, N cells, Natural killer cells, Natural killer T cells, Neurogliaform cells, Neutrophil granulocytes, Nuclear bag cells, Nuclear chain cells, Nucleus pulposus cells, Odontoblasts, Olfactory ensheathing cells, Olfactory epithelium supporting cells, Olfactory receptor neurons, Oligodendrocytes, Oogoniums/Oocytes, Organ of Corti interdental epithelial cells, Osteoblasts/osteocytes, Osteoclasts, Osteoprogenitor cells, Other nonepithelial fibroblasts, Outer hair cells of vestibular system of ear, Outer phalangeal cells of organ of Corti, Outer pillar cells of the organ of Corti, Outer root sheath hair cells, Oxyphil cells, Pain-sensitive primary sensory neurons, Pancreatic acinar cells, Pancreatic stellate cells, Paneth cells, Parafollicular cells, Parathyroid chief cells, Parietal cells, Parietal epithelial cells, Parvocellsular neurosecretory cells, Peptidergic neural cells (various types), Peripolar cells, Photoreceptor blue-sensitive cone cells of eye, Photoreceptor green-sensitive cone cells of eye, Photoreceptor red-sensitive cone cells of eye, Photoreceptor rod cells, Pituicytes, Place cells, Planum semilunar epithelial cells of vestibular system of ear, Plasma cells, Platelets if considered distinct cells, currently there's debate on the subject, Podocyte, PP cells (gamma cells), Principal cells, Proprioceptive primary sensory neurons, Prostate gland cells, Proximal tubule brush border cells, Purkinje cells, Purkinje fiber cells, Red skeletal muscle cells (slow twitch), Regulatory T cells, Renshaw cells, Retina horizontal cells, S cells, SA node cells, Salivary gland mucous cells, Salivary gland serous cells, Satellite glial cells, Schwann cells, Sebaceous gland cells, Seminal vesicle cells, Sertoli cells, Smooth muscle cells, Somatotropes, Speed cells, Spermatids, Spermatocytes, Spermatogonium cells, Spermatozoon cells, Spindle neurons, Starburst amacrine cells, Stellate cells, Stellate cells, Striated duct cells, Surface epithelial cells, Tanycytes, Taste bud supporting cells, Taste receptor cells of taste bud, Tendon fibroblasts, Theca Interna cells, Theca lutein cells, Thyroid epithelial cells, Thyrotropes, Touch-sensitive primary sensory neurons, Transitional epithelium, Trichocytes, Type I pneumocytes, Type II pneumocytes, Unipolar brush cells, Uterus endometrium cells, Vestibular apparatus supporting cells, Von Ebner's gland cells, White fat cells, and White skeletal muscle cells (fast twitch). In some embodiments, a cell of the disclosure is a universal cell, hepatocyte, islet cell (e.g., pancreatic islet or islet of Langerhans), induced pluripotent stem cell (iPSC), mesenchymal stem cell, neural stem cell, fibroblast, nerve cell, muscle cell, epithelial cell, or multi-potent cell. In some cases, the cell is suitable for use in and/or is associated with tissue regeneration.

[0228] Immune cells and/or immune effector cells can be isolated or purified from a sample collected from a subject or a donor using standard techniques known in the art. For example, immune effector cells can be isolated or purified from a whole blood sample by lysing red blood cells and removing peripheral mononuclear blood cells by centrifugation. The immune effector cells can be further isolated or purified using a selective purification method that isolates the immune effector cells based on cell-specific markers such as CD25, CD3, CD4, CD8, CD28, CD45RA, or CD45RO. In one embodiment, CD4⁺ is used as a marker to select T cells. In one embodiment, CD8⁺ is used as a marker to select T cells. In one embodiment, CD4⁺ and CD8⁺ are used as a marker to select regulatory T cells.

[0229] In another embodiment, the present disclosure provides T cells that have been modified (e.g., through base editing) to knock-out expression of beta-2-microglobulin.

[0230] In another embodiment, the present disclosure provides donor T cells selected ex vivo to recognize minor histocompatibility antigens expressed on recipient hematopoietic cells, thereby minimizing the risk of graft-versus-host disease (GVHD), which is the main cause of morbidity and mortality after transplantation (Warren et al., Blood 2010; 115 (19): 3869-3878).

[0231] Another technique for isolating or purifying immune effector cells is flow cytometry. In fluorescence activated cell sorting a fluorescently labelled antibody with affinity for an immune effector cell marker is used to label immune effector cells in a sample. A gating strategy appropriate for the cells expressing the marker is used to segregate the cells. For example, T lymphocytes can be separated from other cells in a sample by using, for example, a fluorescently labeled antibody specific for an immune effector cell marker (e.g., CD4, CD8, CD28, CD45) and corresponding gating strategy. In one embodiment, a CD4 gating strategy is employed. In one embodiment, a CD8 gating strategy is employed. In one embodiment, a CD4 and CD8 gating strategy is employed. In some embodiments, a gating strategy for other markers specific to an immune effector cell is employed instead of, or in combination with, the CD4 and/or CD8 gating strategy.

[0232] The immune effector cells contemplated in the present disclosure are effector T cells. In some embodiments, the effector T cell is a naïve CD8⁺ T cell, a cytotoxic T cell, a natural killer T (NKT) cell, a natural killer (NK) cell, or a regulatory T (Treg) cell. In some embodiments, the effector T cells are thymocytes, immature T lymphocytes, mature T lymphocytes, resting T lymphocytes, or activated T lymphocytes. In some embodiments the immune effector cell is a CD4+CD8⁺ T cell or a CD4-CD8-T cell. In some embodiments the immune effector cell is a T helper cell. In some embodiments the T helper cell is a T helper 1 (Th1), a T helper 2 (Th2) cell, or a helper T cell expressing CD4 (CD4+ T cell). In some embodiments, immune effector cells are effector NK cells. In some embodiments, the immune effector cell is any other subset of T cells. The modified immune effector cell may express, in addition to the chimeric antigen receptor (CAR), an exogenous cytokine, a different chimeric receptor, or any other agent that would enhance immune effector cell signaling or function. For example, co-expression of the chimeric antigen receptor and a cytokine may enhance the CAR-T cell's ability to lyse a target cell.

[0233] Chimeric antigen receptors (CARs) as contemplated in the present disclosure may comprise an extracellular binding domain, a transmembrane domain, and an intracellular domain. Binding of an antigen to the extracellular binding domain can activate the CAR-T cell and generate an effector response, which includes CAR-T cell proliferation, cytokine production, and other processes that lead to the death of the antigen expressing cell. Exemplary CARs include those described in Maldini, et al. “Dual CD4-based CAR-T cells with distinct costimulatory domains mitigate HIV pathogenesis in vivo,” Nat. Med. 26:1776-1787 (2020); Maldini, et al. “HIV-Resistant and HIV-Specific CAR-Modified CD4+ T Cells Mitigate HIV Disease Progression and Confer CD4+ T Cell Help In Vivo,” Mol. Ther. 28:1585-1599 (2020); and Leibman, et al. “Supraphysiologic control over HIV-1 replication mediated by CD8 T cells expressing a re-engineered CD4-based chimeric antigen receptor,” PLOS Pathog. 13 (10): e1006613 (2017), the entire disclosure of each of which is incorporated herein by reference in its entirety for all purposes.

[0234] In some embodiments of the present disclosure, the chimeric antigen receptor further comprises a linker. In some embodiments, the linker is a (GGGGS)ₙ linker (SEQ ID NO: 247). In some embodiments, the linker is a (GGGGS)₃ linker (SEQ ID NO: 478). In some embodiments, a CAR of the present disclosure includes a leader peptide sequence (e.g., N-terminal to the antigen binding domain). An exemplary leader peptide amino acid sequence is:

(SEQ ID NO: 479)
METDTLLLWVLLLWVPGSTG.

[0235] Provided herein are also nucleic acids that encode the chimeric antigen receptors (CARs) described herein. In some embodiments, the nucleic acid molecule is isolated or purified. Delivery of the nucleic acid molecules ex vivo can be accomplished using methods known in the art. For example, immune cells obtained from a subject may be transformed with a nucleic acid vector encoding the chimeric antigen receptor. The vector may then be used to transform recipient immune cells so that these cells will then express the chimeric antigen receptor. Efficient means of transforming immune cells include transfection and transduction. Such methods are well known in the art. For example, applicable methods for delivery the nucleic acid molecule encoding the chimeric antigen receptor (and the nucleic acid(s) encoding the base editor) can be found in International Application No. PCT/US2009/040040 and U.S. Pat. Nos. 8,450,112; 9,132,153; and 9,669,058, each of which is incorporated herein in its entirety. Additionally, those methods and vectors described herein for delivering the nucleic acid encoding the base editor are applicable to delivering the nucleic acid encoding the chimeric antigen receptor.

[0236] Some aspects of the present disclosure provide for immune cells comprising a chimeric antigen receptor (CAR) and an altered endogenous gene that provides increased resistance to lysis by immune effector cells (e.g., alloreactive T cells and/or natural killer cells), resistance to fratricide, enhances immune cell function, resistance to immunosuppression or inhibition, or a combination thereof. In some embodiments, the altered endogenous gene may be created by base editing. In some embodiments, the base editing may reduce or attenuate the gene expression. In some embodiments, the base editing may reduce or attenuate the gene activation. In some embodiments, the base editing may reduce or attenuate the functionality of the gene product. In some other embodiments, the base editing may activate or enhance the gene expression. In some embodiments, the base editing may increase the functionality of the gene product. In some embodiments, the altered endogenous gene may be modified or edited in an exon, an intron, an exon-intron injunction, or a regulatory element thereof. The modification may be edit to a single nucleobase in a gene or a regulatory element thereof. The modification may be in a exon, more than one exons, an intron, or more than one introns, or a combination thereof. The modification may be in an open reading frame of a gene. The modification may be in an untranslated region of the gene, for example, a 3′-UTR or a 5′-UTR. In some embodiments, the modification is in a regulatory element of an endogenous gene. In some embodiments, the modification is in a promoter, an enhancer, an operator, a silencer, an insulator, a terminator, a transcription initiation sequence, a translation initiation sequence (e.g. a Kozak sequence), or any combination thereof.

[0237] Allogeneic immune cells expressing an endogenous immune cell receptor, as well as a chimeric antigen receptor (CAR) may recognize and attack host cells, a circumstance termed graft versus host disease (GVHD). The alpha component of the immune cell receptor complex is encoded by the TRAC gene, and in some embodiments, this gene is edited such that the alpha subunit of the TCR complex is nonfunctional or absent. Because this subunit is necessary for endogenous immune cell signaling, editing this gene can reduce the risk of graft versus host disease caused by allogeneic immune cells.

[0238] In some embodiments, editing of genes and/or expression of an HLA class-I single chain dimer or trimer of the present disclosure to provide increased resistance to lysis by immune effector cells (e.g., alloreactive T cells or natural killer cells), fratricide resistance, enhance the function of the immune cell and/or to reduce immunosuppression or inhibition can occur in the immune cell before the cell is transformed to express a chimeric antigen receptor (CAR). In other aspects, editing of genes and/or expression of an HLA class-I single chain dimer or trimer to increase resistance to lysis by immune effector cells (e.g., alloreactive T cells or natural killer cells), provide fratricide resistance, enhance the function of the immune cell or to reduce immunosuppression or inhibition can occur in a CAR-T cell, i.e., after the immune cell has been transformed to express a chimeric antigen receptor (CAR).

[0239] In some embodiments, the immune cell may comprise one or more edited genes, one or more regulatory elements thereof, or combinations thereof, wherein expression of the edited gene is either knocked out or knocked down. In some embodiments, the immune cell may comprise one or more edited genes, one or more regulatory elements thereof, or combinations thereof, wherein expression of the edited gene is increased. In some embodiments, the immune cell may comprise a chimeric antigen receptor (CAR) and one or more edited genes, one or more regulatory elements thereof, or combinations thereof, wherein expression of the edited gene is either knocked out or knocked down. In some embodiments, the immune cell may comprise a chimeric antigen receptor (CAR) and one or more edited genes, one or more regulatory elements thereof, or combinations thereof, wherein expression of the edited gene is increased.

[0240] In some embodiments, the modified immune cells of the present disclosure have reduced or inactivated surface HLA class-I expression relative to a reference cell. In some embodiments, the modified immune cells have increased resistance to lysis by immune effector cells (e.g., alloreactive T cells or natural killer cells) relative to a reference cell. In some embodiments, the modified immune cells cells have increased fratricide resistance relative to a reference cell. In some embodiments, the modified immune cells have reduced immunogenicity relative to a reference cell. In some embodiments, the modified immune cells have increased anti-neoplasia activity relative to a reference cell. In some embodiments, the modified immune cells have increased T- and/or NK-cell resistance relative to a reference cell. The one or more genes may be edited by base editing. In some embodiments the one or more genes are directed to components of the peptide loading complex (PLC) or regulatory components thereof. In some embodiments the one or more genes may be selected from a group consisting of: β2M, TAP1, TAP2, Tapasin, and CD58. In some the genes may be edited by base editing and or using a nuclease (e.g., Cas12b). In some embodiments, the one or more genes are selected from CD58, CD115, CD48, MICA, MICB, Nectin-2, ULBP, β2M, TAP1, TAP2, TAPBP, PDIA3, NLRC5, HLA-A, HLA-B, and/or HLA-C. In some embodiments, one or more additional genes may be edited using a base editor or nuclease. In some embodiments, the one or more additional genes may be selected from TRAC, and CIITA. In some embodiments, the one or more additional genes edited may be selected from HLA-E, HLA-G, PD-L1, and CD47. In some embodiments, one or more of β2M, TAP1, TAP2, Tapasin, and/or CD58 are edited in combination with edits in each of HLA-E, HLA-G, PD-L1, and CD47.

[0241] In some embodiments, an immune cell comprises a chimeric antigen receptor, an HLA class-I single chain dimer or trimer, and/or one or more edited genes, a regulatory element thereof, or combinations thereof. An edited gene may be an immune response regulation gene, an immunogenic gene, a checkpoint inhibitor gene, a gene involved in immune responses, a cell surface marker, e.g. a T cell surface marker, or any combination thereof. In some embodiments, an immune cell comprises a chimeric antigen receptor and an edited gene that is associated with activated T cell proliferation, alpha-beta T cell activation, gamma-delta T cell activation, positive regulation of T cell proliferation, negative regulation of T-helper cell proliferation or differentiation, or their regulatory elements thereof, or combinations thereof. In some embodiments, the edited gene may be a checkpoint inhibitor gene, for example, such as a PD1 gene, a PDC1 gene, or a member related to or regulating the pathway of their formation or activation.

[0242] In some embodiments, provided herein is an immune cell with an edited gene in the peptide loading complex (PLC) or a regulatory element thereof, such that the immune cell does not express or expresses at reduced levels surface HLA class-I peptides. In embodiments, the immune cell expresses an altered β2M polypeptide that effects reduced levels of surface HLA class-I peptide expression relative to a reference cell. In some embodiments, provided herein is an immune cell with an edited gene in the peptide loading complex (PLC) or a regulatory element thereof, such that the immune cell has increased resistance to lysis by alloreactive T cells and/or other immune effector cells. In some embodiments, the immune cell comprises an edited gene in the peptide loading complex (PLC) or a regulatory element thereof, and additionally, at least one other edited gene.

[0243] In some embodiments, provided herein is an immune cell (e.g., T- or NK-cell) with an edited 82M gene, such that the immune cell does not express an endogenous functional Beta-2-microglobulin. In some embodiments, provided herein is an immune cell with an edited 82M gene, such that the immune cell does not express or expresses at reduced levels surface HLA class-I peptides. In some embodiments, provided herein is an immune cell with an edited β2M gene, such that the immune cell has increased resistance to lysis by an effector cell (e.g., an alloreactive T cell or a natural killer cell). In some embodiments, the immune cell comprises an edited β2M gene, and additionally, at least one other edited gene.

[0244] In some embodiments, each edited gene may comprise a single base edit. In some embodiments, each edited gene may comprise multiple base edits at different regions of the gene. In some embodiments, a single modification event (such as electroporation), may introduce one or more gene edits. In some embodiments at least one, two, three, four, five, six, seven, eight, nine, ten, eleven, twelve, thirteen, fourteen, fifteen, sixteen, seventeen, eighteen, nineteen, twenty or more edits may be introduced in one or more genes simultaneously. In some embodiments, an immune cell, including but not limited to any immune cell comprising an edited gene selected from any of the aforementioned gene edits, can be edited to generate mutations in other genes that enhance the CAR-T's function or reduce immunosuppression or inhibition of the cell.

### Editing of Target Polynucleotides in Immune Cells

[0245] In general, base editing is carried out to induce therapeutic changes (e.g., knocking out of expression of beta-2-microglobulin and/or another polypeptide(s) listed herein) in the genome of a cell (e.g., immune cell (e.g., T- or NK-cell)). Base editing can be carried out in vitro or in vivo. In various embodiments, base editing can be used to introduce a stop codon to a gene or to disrupt a splice motif (e.g., a acceptor site, or a splice donor site). In some embodiments, cells (e.g., immune cell (e.g., T- or NK-cell)) are collected from a subject or a donor. In some embodiments, base editing is carried out to induce therapeutic changes in the genome of an immune cell (e.g., T- or NK-cell). In some embodiments, base editing is carried out to induce therapeutic changes in the genome of an allogeneic immune cell (e.g., T- or NK-cell) of a subject. In some embodiments, base editing is carried out to induce therapeutic changes in the genome of an allogeneic CAR-T cell.

[0246] To produce the gene edits described above, immune cells are collected from a subject and contacted with one or more guide RNAs and a nucleobase editor polypeptide comprising a nucleic acid programmable DNA binding protein (napDNAbp) and a cytidine deaminase or adenosine deaminase, or comprising one or more deaminases with cytidine deaminase and/or adenosine deaminase activity (e.g., a “dual deaminase” which has cytidine and adenosine deaminase activity). In some embodiments, cells to be edited are contacted with at least one nucleic acid, wherein the at least one nucleic acid encodes one or more guide RNAs and a nucleobase editor polypeptide comprising a nucleic acid programmable DNA binding protein (napDNAbp) and a cytidine deaminase. In some embodiments, the gRNA comprises nucleotide analogs. In some instances, the gRNA is added directly to a cell. These nucleotide analogs can inhibit degradation of the gRNA from cellular processes. Tables 1 and 2 provide representative target sequences and spacer sequences to be used for gRNAs, as well as representative gRNA sequences.

[0247] In some embodiments, immune cells (e.g., T- or NK-cell) of the present disclosure, are contacted with one or more guide RNAs and a nucleobase editor polypeptide comprising a nucleic acid programmable DNA binding protein (napDNAbp) (e.g., Cas9) domain and a deaminase (e.g., cytidine deaminase and/or adenosine deaminase) domain. In some embodiments, immune cells (e.g., T- or NK-cell) of the present disclosure, are contacted with one or more guide RNAs and a nucleobase editor polypeptide comprising a nucleic acid programmable DNA binding protein (napDNAbp) (e.g., Cas9) domain and an adenosine deaminase domain. In some embodiments, immune cells (e.g., T- or NK-cell) of the present disclosure, are contacted with one or more guide RNAs and a nucleobase editor polypeptide comprising a nucleic acid programmable DNA binding protein (napDNAbp) (e.g., Cas9) domain and a cytidine deaminase domain. In some embodiments, immune cells (e.g., T- or NK-cell) of the present disclosure, are contacted with one or more guide RNAs and a nucleobase editor polypeptide comprising a nucleic acid programmable DNA binding protein (napDNAbp) (e.g., Cas9) domain and an adenosine/cytidine deaminase domain. In some embodiments, the at least one nucleic acid molecule encoding one or more guide RNAs and a nucleobase editor polypeptide is delivered to cells by one or more vectors (e.g., AAV vector).

[0248] In some embodiments, one or more vectors (e.g., AAV vector) comprise at least one nucleic acid molecule encoding one or more guide RNAs and a nucleobase editor polypeptide, which comprises a nucleic acid programmable DNA binding protein (napDNAbp) (e.g., Cas9) domain and a deaminase (e.g., cytidine deaminase and/or adenosine deaminase) domain. In some embodiments, one or more vectors (e.g., AAV vector) comprise at least one nucleic acid molecule encoding one or more guide RNAs, which direct a nucleobase editor polypeptide to edit a site in the genome of a cell (e.g., immune cell (e.g., T- or NK-cell)).

[0249] The present disclosure provides one or more guide RNAs that direct a nucleobase editor polypeptide to edit a site in the genome of the cell (e.g., immune cell (e.g., T- or NK-cell)). In some embodiments, the present disclosure provides guide RNAs that target components of the peptide loading complex (PLC) (e.g., β2M, TAP1, TAP2, Tapasin) and/or CD58 in an immune cell (e.g., T- or NK-cell). In some embodiments, the present disclosure provides guide RNAs that target β2M, TAP1, TAP2, Tapasin, and/or CD58. In some embodiments, the gRNA comprises nucleotide analogs. These nucleotide analogs can inhibit degradation of the gRNA from cellular processes. Exemplary guide spacer sequences, gRNA sequences, and target sequences are provided in the following Tables 1 and 2. A non-limiting example of a gRNA scaffold sequence includes the following:

(SEQ ID NO: 626)
GUUUUAGAGCUAGAAAUAGCAAGUUAAAAUAA
GGCUAGUCCGUUAUCAACUUGAAAAAGUGGCA
CCGAGUCGGUGCUUUU.

[0250] In various instances, it is advantageous for a spacer sequence to include a 5′ and/or a 3′ “G” nucleotide. In some cases, for example, any spacer sequence or guide polynucleotide provided herein comprises or further comprises a 5′ “G”, where, in some embodiments, the 5′ “G” is or is not complementary to a target sequence. In some embodiments, the 5′ “G” is added to a spacer sequence that does not already contain a 5′ “G.” For example, it can be advantageous for a guide RNA to include a 5′ terminal “G” when the guide RNA is expressed under the control of a U6 promoter or the like because the U6 promoter prefers a “G” at the transcription start site (see Cong, L. et al. “Multiplex genome engineering using CRISPR/Cas systems. Science 339:819-823 (2013) doi: 10.1126/science.1231143). In some cases, a 5′ terminal “G” is added to a guide polynucleotide that is to be expressed under the control of a promoter, but is optionally not added to the guide polynucleotide if or when the guide polynucleotide is not expressed under the control of a promoter.

[0251] Exemplary guide RNA and spacer sequences suitable for use in methods of the disclosure include those listed in PCT/US22/75021, filed Aug. 16, 2022, the disclosure of which is incorporated herein in its entirety for all purposes.

TABLE 1
Exemplary Guide RNAs.

| | | | | | | Guide |
|---|---|---|---|---|---|---|
| | | | | | | with |
| | | | | | | Guide |
| | | | | Guide | | Scaffold |
| | | Base | Spacer | SEQ ID | | SEQ ID |
| Guide No. | Gene | Editor | Sequence | NO: | gRNA sequence | NO: |
| TSBTx760 | B2M | ABE | CUUACCCC | 537 | CUUACCCCACUUAACUAU | 577 |
| | | | ACUUAACU | | CUGUUUUAGAGCUAGAA | |
| | | | AUCU | | AUAGCAAGUUAAAAUAA | |
| | | | | | GGCUAGUCCGUUAUCAAC | |
| | | | | | UUGAAAAAGUGGCACCGA | |
| | | | | | GUCGGUGCUUUU | |
| Guide 417 | B2M | CBE | ACAGCCC | 538 | ACAGCCCAAGAUAGUUAAG | 578 |
| (b2m_315) | | | AAGAUAG | | UGUUUUAGAGCUAGAAAUA | |
| | | | UUAAGU | | GCAAGUUAAAAUAAGGCUA | |
| | | | | | GUCCGUUAUCAACUUGAAA | |
| | | | | | AAGUGGCACCGAGUCGGUG | |
| | | | | | CUUUU | |
| Guide 418 | B2M | CBE | CAGCCCA | 539 | CAGCCCAAGAUAGUUAAGU | 579 |
| (b2m_316) | | | AGAUAGU | | GGUUUUAGAGCUAGAAAUA | |
| | | | UAAGUG | | GCAAGUUAAAAUAAGGCUA | |
| | | | | | GUCCGUUAUCAACUUGAAA | |
| | | | | | AAGUGGCACCGAGUCGGUG | |
| | | | | | CUUUU | |
| Guide 431 | B2M | CBE, | CAGUAAG | 540 | CAGUAAGUCAACUUCAAUG | 580 |
| (b2m_629) | | ABE | UCAACUU | | UGUUUUAGAGCUAGAAAUA | |
| | | | CAAUGU | | GCAAGUUAAAAUAAGGCUA | |
| | | | | | GUCCGUUAUCAACUUGAAA | |
| | | | | | AAGUGGCACCGAGUCGGUG | |
| | | | | | CUUUU | |
| b2m_825 | B2M | CBE | ACUCACG | 541 | ACUCACGCUGGAUAGCCUC | 581 |
| (TSBTx84 | | | CUGGAUA | | CGUUUUAGAGCUAGAAAUA | |
| 5) | | | GCCUCC | | GCAAGUUAAAAUAAGGCUA | |
| | | | | | GUCCGUUAUCAACUUGAAA | |
| | | | | | AAGUGGCACCGAGUCGGUG | |
| | | | | | CUUUU | |
| b2m_630 | B2M | CBE | AAGUCAA | 542 | AAGUCAACUUCAAUGUCGG | 582 |
| | | | CUUCAAU | | AGUUUUAGAGCUAGAAAUA | |
| | | | GUCGGA | | GCAAGUUAAAAUAAGGCUA | |
| | | | | | GUCCGUUAUCAACUUGAAA | |
| | | | | | AAGUGGCACCGAGUCGGUG | |
| | | | | | CUUUU | |
| b2m_227 | B2M | CBE | GGAUUUG | 543 | GGAUUUGCCUAGCUUCCCC | 583 |
| | | | CCUAGCU | | AGUUUUAGAGCUAGAAAUA | |
| | | | UCCCCA | | GCAAGUUAAAAUAAGGCUA | |
| | | | | | GUCCGUUAUCAACUUGAAA | |
| | | | | | AAGUGGCACCGAGUCGGUG | |
| | | | | | CUUUU | |
| b2m_596 | B2M | CBE | UCGAUCU | 544 | UCGAUCUAUGAAAAAGACA | 584 |
| | | | AUGAAAA | | GGUUUUAGAGCUAGAAAUA | |
| | | | AGACAG | | GCAAGUUAAAAUAAGGCUA | |
| | | | | | GUCCGUUAUCAACUUGAAA | |
| | | | | | AAGUGGCACCGAGUCGGUG | |
| | | | | | CUUUU | |
| TSBTx418 | HLA- | ABE, | UGACGGC | 545 | UGACGGCCAUCCUCGGCGU | 585 |
| 6 (846) | A | CBE | CAUCCUC | | CGUUUUAGAGCUAGAAAUA | |
| | | | GGCGUC | | GCAAGUUAAAAUAAGGCUA | |
| | | | | | GUCCGUUAUCAACUUGAAA | |
| | | | | | AAGUGGCACCGAGUCGGUG | |
| | | | | | CUUUU | |
| TSBTx418 | HLA- | ABE, | GACGGCC | 546 | GACGGCCAUCCUCGGCGUC | 586 |
| 7 (847) | A | CBE | AUCCUCG | | UGUUUUAGAGCUAGAAAUA | |
| | | | GCGUCU | | GCAAGUUAAAAUAAGGCUA | |
| | | | | | GUCCGUUAUCAACUUGAAA | |
| | | | | | AAGUGGCACCGAGUCGGUG | |
| | | | | | CUUUU | |
| TSBTx418 | HLA- | ABE, | ACGGCCA | 547 | ACGGCCAUCCUCGGCGUCU | 587 |
| 8 (848) | A | CBE | UCCUCGG | | GGUUUUAGAGCUAGAAAUA | |
| | | | CGUCUG | | GCAAGUUAAAAUAAGGCUA | |
| | | | | | GUCCGUUAUCAACUUGAAA | |
| | | | | | AAGUGGCACCGAGUCGGUG | |
| | | | | | CUUUU | |
| TSBTx418 | HLA- | ABE, | CGCACUC | 548 | CGCACUCACCCGCCCAGGU | 588 |
| 9 (849) | A | CBE | ACCCGCC | | CGUUUUAGAGCUAGAAAUA | |
| | | | CAGGUC | | GCAAGUUAAAAUAAGGCUA | |
| | | | | | GUCCGUUAUCAACUUGAAA | |
| | | | | | AAGUGGCACCGAGUCGGUG | |
| | | | | | CUUUU | |
| TSBTx419 | HLA- | ABE, | GCACUCA | 549 | GCACUCACCCGCCCAGGUC | 589 |
| 0 (850) | A | CBE | CCCGCCC | | UGUUUUAGAGCUAGAAAUA | |
| | | | AGGUCU | | GCAAGUUAAAAUAAGGCUA | |
| | | | | | GUCCGUUAUCAACUUGAAA | |
| | | | | | AAGUGGCACCGAGUCGGUG | |
| | | | | | CUUUU | |
| TSBTx419 | HLA- | ABE | CCCAGGC | 550 | CCCAGGCUCGCACUCCAUG | 590 |
| 1 (851) | A | | UCGCACU | | GUUUUAGAGCUAGAAAUAG | |
| | | | CCAUG | | CAAGUUAAAAUAAGGCUAG | |
| | | | | | UCCGUUAUCAACUUGAAAA | |
| | | | | | AGUGGCACCGAGUCGGUGC | |
| | | | | | UUUU | |
| TSBTx419 | HLA- | ABE, | GUCACUC | 551 | GUCACUCACCGGCCUCGCU | 591 |
| 2 (852) | A, | CBE | ACCGGCC | | CGUUUUAGAGCUAGAAAUA | |
| | HLA- | | UCGCUC | | GCAAGUUAAAAUAAGGCUA | |
| | B, | | | | GUCCGUUAUCAACUUGAAA | |
| | HLA-C | | | | AAGUGGCACCGAGUCGGUG | |
| | | | | | CUUUU | |
| TSBTx419 | HLA- | ABE, | CCUUACC | 552 | CCUUACCCCAUCUCAGGGU | 592 |
| 3 (853) | A, | CBE | CCAUCUC | | GGUUUUAGAGCUAGAAAUA | |
| | HLA- | | AGGGUG | | GCAAGUUAAAAUAAGGCUA | |
| | B, | | | | GUCCGUUAUCAACUUGAAA | |
| | HLA-C | | | | AAGUGGCACCGAGUCGGUG | |
| | | | | | CUUUU | |
| TSBTx419 | HLA- | ABE, | CUUACCC | 553 | CUUACCCCAUCUCAGGGUG | 593 |
| 4 (854) | A, | CBE | CAUCUCA | | AGUUUUAGAGCUAGAAAUA | |
| | HLA- | | GGGUGA | | GCAAGUUAAAAUAAGGCUA | |
| | B, | | | | GUCCGUUAUCAACUUGAAA | |
| | HLA-C | | | | AAGUGGCACCGAGUCGGUG | |
| | | | | | CUUUU | |
| TSBTx419 | HLA- | CBE | GGCUCUG | 554 | GGCUCUGGGAAAAGAGGGG | 594 |
| 5 (855) | A | | GGAAAAG | | AGUUUUAGAGCUAGAAAUA | |
| | | | AGGGGA | | GCAAGUUAAAAUAAGGCUA | |
| | | | | | GUCCGUUAUCAACUUGAAA | |
| | | | | | AAGUGGCACCGAGUCGGUG | |
| | | | | | CUUUU | |
| TSBTx419 | HLA- | ABE | CUUCCCA | 555 | CUUCCCACAGAUAGAAAAG | 595 |
| 6 (856) | A | | CAGAUAG | | GGUUUUAGAGCUAGAAAUA | |
| | | | AAAAGG | | GCAAGUUAAAAUAAGGCUA | |
| | | | | | GUCCGUUAUCAACUUGAAA | |
| | | | | | AAGUGGCACCGAGUCGGUG | |
| | | | | | CUUUU | |
| TSBTx419 | HLA- | ABE | UUCCCAC | 556 | UUCCCACAGAUAGAAAAGG | 596 |
| 7 (857) | A | | AGAUAGA | | AGUUUUAGAGCUAGAAAUA | |
| | | | AAAGGA | | GCAAGUUAAAAUAAGGCUA | |
| | | | | | GUCCGUUAUCAACUUGAAA | |
| | | | | | AAGUGGCACCGAGUCGGUG | |
| | | | | | CUUUU | |
| TSBTx419 | HLA- | ABE | CCCAGGC | 557 | CCCAGGCAGUGACAGUGCC | 597 |
| 8 (858) | A | | AGUGACA | | CGUUUUAGAGCUAGAAAUA | |
| | | | GUGCCC | | GCAAGUUAAAAUAAGGCUA | |
| | | | | | GUCCGUUAUCAACUUGAAA | |
| | | | | | AAGUGGCACCGAGUCGGUG | |
| | | | | | CUUUU | |
| TSBTx419 | HLA- | ABE | CCAGGCA | 558 | CCAGGCAGUGACAGUGCCC | 598 |
| 9 (859) | A | | GUGACAG | | AGUUUUAGAGCUAGAAAUA | |
| | | | UGCCCA | | GCAAGUUAAAAUAAGGCUA | |
| | | | | | GUCCGUUAUCAACUUGAAA | |
| | | | | | AAGUGGCACCGAGUCGGUG | |
| | | | | | CUUUU | |
| TSBTx420 | HLA- | ABE | GACCCGC | 559 | GACCCGCAUCUCGGCGUCU | 599 |
| 0 (860) | B, | | AUCUCGG | | GGUUUUAGAGCUAGAAAUA | |
| | HLA-C | | CGUCUG | | GCAAGUUAAAAUAAGGCUA | |
| | | | | | GUCCGUUAUCAACUUGAAA | |
| | | | | | AAGUGGCACCGAGUCGGUG | |
| | | | | | CUUUU | |
| TSBTx420 | HLA-B | ABE, | GCACUCA | 560 | GCACUCACCGGCCCAGGUC | 600 |
| 1 (861) | | CBE | CCGGCCC | | UGUUUUAGAGCUAGAAAUA | |
| | | | AGGUCU | | GCAAGUUAAAAUAAGGCUA | |
| | | | | | GUCCGUUAUCAACUUGAAA | |
| | | | | | AAGUGGCACCGAGUCGGUG | |
| | | | | | CUUUU | |
| TSBTx420 | HLA-B | CBE | UGGGAGC | 561 | UGGGAGCCUGGGGGCGAGG | 601 |
| 2 (862) | | | CUGGGGG | | AGUUUUAGAGCUAGAAAUA | |
| | | | CGAGGA | | GCAAGUUAAAAUAAGGCUA | |
| | | | | | GUCCGUUAUCAACUUGAAA | |
| | | | | | AAGUGGCACCGAGUCGGUG | |
| | | | | | CUUUU | |
| TSBTx420 | HLA-B | CBE | GGGAGCC | 562 | GGGAGCCUGGGGGCGAGGA | 602 |
| 3 (863) | | | UGGGGGC | | GGUUUUAGAGCUAGAAAUA | |
| | | | GAGGAG | | GCAAGUUAAAAUAAGGCUA | |
| | | | | | GUCCGUUAUCAACUUGAAA | |
| | | | | | AAGUGGCACCGAGUCGGUG | |
| | | | | | CUUUU | |
| TSBTx420 | HLA- | ABE | CCCCAGG | 563 | CCCCAGGCUCCCACUCCAU | 603 |
| 4 (864) | B, | | CUCCCAC | | GGUUUUAGAGCUAGAAAUA | |
| | HLA-C | | UCCAUG | | GCAAGUUAAAAUAAGGCUA | |
| | | | | | GUCCGUUAUCAACUUGAAA | |
| | | | | | AAGUGGCACCGAGUCGGUG | |
| | | | | | CUUUU | |
| TSBTx420 | HLA- | ABE, | UUACCCC | 564 | UUACCCCAUCUCAGGGUGA | 604 |
| 5 (865) | B, | CBE | AUCUCAG | | GGUUUUAGAGCUAGAAAUA | |
| | HLA-C | | GGUGAG | | GCAAGUUAAAAUAAGGCUA | |
| | | | | | GUCCGUUAUCAACUUGAAA | |
| | | | | | AAGUGGCACCGAGUCGGUG | |
| | | | | | CUUUU | |
| TSBTx420 | HLA- | ABE | UUCCCAC | 565 | UUCCCACAGGUGGAAAAGG | 605 |
| 6 (866) | B, | | AGGUGGA | | AGUUUUAGAGCUAGAAAUA | |
| | HLA-C | | AAAGGA | | GCAAGUUAAAAUAAGGCUA | |
| | | | | | GUCCGUUAUCAACUUGAAA | |
| | | | | | AAGUGGCACCGAGUCGGUG | |
| | | | | | CUUUU | |
| TSBTx420 | HLA-C | ABE, | UGACCCG | 566 | UGACCCGCAUCUCGGCGUC | 606 |
| 7 (867) | | CBE | CAUCUCG | | UGUUUUAGAGCUAGAAAUA | |
| | | | GCGUCU | | GCAAGUUAAAAUAAGGCUA | |
| | | | | | GUCCGUUAUCAACUUGAAA | |
| | | | | | AAGUGGCACCGAGUCGGUG | |
| | | | | | CUUUU | |
| TSBTx420 | HLA-C | ABE, | GCACUCA | 567 | GCACUCACAGGCCCAGGUC | 607 |
| 8 (868) | | CBE | CAGGCCC | | UGUUUUAGAGCUAGAAAUA | |
| | | | AGGUCU | | GCAAGUUAAAAUAAGGCUA | |
| | | | | | GUCCGUUAUCAACUUGAAA | |
| | | | | | AAGUGGCACCGAGUCGGUG | |
| | | | | | CUUUU | |
| TSBTx420 | HLA-C | ABE, | CACAGGC | 568 | CACAGGCCCAGGUCUCGGU | 608 |
| 9 (869) | | CBE | CCAGGUC | | CGUUUUAGAGCUAGAAAUA | |
| | | | UCGGUC | | GCAAGUUAAAAUAAGGCUA | |
| | | | | | GUCCGUUAUCAACUUGAAA | |
| | | | | | AAGUGGCACCGAGUCGGUG | |
| | | | | | CUUUU | |
| TSBTx421 | HLA-C | CBE | AGACCCU | 569 | AGACCCUGGCCCCGCCCCC | 609 |
| 0 (870) | | | GGCCCCG | | GGUUUUAGAGCUAGAAAUA | |
| | | | CCCCCG | | GCAAGUUAAAAUAAGGCUA | |
| | | | | | GUCCGUUAUCAACUUGAAA | |
| | | | | | AAGUGGCACCGAGUCGGUG | |
| | | | | | CUUUU | |
| TSBTx421 | HLA-C | CBE | GGCUCUG | 570 | GGCUCUGGGAAAGGAGGGG | 610 |
| 1 (871) | | | GGAAAGG | | AGUUUUAGAGCUAGAAAUA | |
| | | | AGGGGA | | GCAAGUUAAAAUAAGGCUA | |
| | | | | | GUCCGUUAUCAACUUGAAA | |
| | | | | | AAGUGGCACCGAGUCGGUG | |
| | | | | | CUUUU | |
| TSBTx421 | HLA-C | ABE | CCCAGCC | 571 | CCCAGCCAGCAACAGUGCC | 611 |
| 2 (872) | | | AGCAACA | | CGUUUUAGAGCUAGAAAUA | |
| | | | GUGCCC | | GCAAGUUAAAAUAAGGCUA | |
| | | | | | GUCCGUUAUCAACUUGAAA | |
| | | | | | AAGUGGCACCGAGUCGGUG | |
| | | | | | CUUUU | |
| TSBTx416 | HLA-C | Cas12b | GGACCGG | 572 | GUUCUGUCUUUUGGUCAGG | 612 |
| 7 (873) | | | GAGACAC | | ACAACCGUCUAGCUAUAAG | |
| | | | AGAAGUA | | UGCUGCAGGGUGUGAGAAA | |
| | | | C | | CUCCUAUUGCUGGACGAUG | |
| | | | | | UCUCUUACGAGGCAUUAGC | |
| | | | | | ACGGACCGGGAGACACAGA | |
| | | | | | AGUAC | |
| TSBTx416 | HLA- | Cas12b | CAUCGCC | 573 | GUUCUGUCUUUUGGUCAGG | 613 |
| 8 (874) | C, | | CUGAACG | | ACAACCGUCUAGCUAUAAG | |
| | HLA- | | AGGACCU | | UGCUGCAGGGUGUGAGAAA | |
| | B, | | G | | CUCCUAUUGCUGGACGAUG | |
| | HLA- | | | | UCUCUUACGAGGCAUUAGC | |
| | A | | | | ACCAUCGCCCUGAACGAGG | |
| | | | | | ACCUG | |
| TSBTx416 | HLA-C | Cas12b | CAUCGCC | 574 | GUUCUGUCUUUUGGUCAGG | 614 |
| 9 (875) | | | CUGAACG | | ACAACCGUCUAGCUAUAAG | |
| | | | AGGAUCU | | UGCUGCAGGGUGUGAGAAA | |
| | | | G | | CUCCUAUUGCUGGACGAUG | |
| | | | | | UCUCUUACGAGGCAUUAGC | |
| | | | | | ACCAUCGCCCUGAACGAGG | |
| | | | | | AUCUG | |
| TSBTx417 | HLA-B | Cas12b | UUGCUGG | 575 | GUUCUGUCUUUUGGUCAGG | 615 |
| 0 (876) | | | CCUGGCU | | ACAACCGUCUAGCUAUAAG | |
| | | | GUCCUAG | | UGCUGCAGGGUGUGAGAAA | |
| | | | C | | CUCCUAUUGCUGGACGAUG | |
| | | | | | UCUCUUACGAGGCAUUAGC | |
| | | | | | ACUUGCUGGCCUGGCUGUC | |
| | | | | | CUAGC | |
| TSBTx416 | HLA- | Cas12b | CAUCGCC | 576 | GUUCUGUCUUUUGGUCAGG | 616 |
| 8 (877) | A | | CUGAACG | | ACAACCGUCUAGCUAUAAG | |
| | | | AGGACCU | | UGCUGCAGGGUGUGAGAAA | |
| | | | G | | CUCCUAUUGCUGGACGAUG | |
| | | | | | UCUCUUACGAGGCAUUAGC | |
| | | | | | ACCAUCGCCCUGAACGAGG | |
| | | | | | ACCUG | |

TABLE 2
Exemplary Spacers.

| | | | SEQ | |
|---|---|---|---|---|
| ID | Target | Spacer Sequence | ID NO | Editor |
| TSBTx760 | B2M | CUUACCCCACUUAACUAU | 617 | ABE |
| | | CU | | |
| sgRNA990 | HLA | UCCUUACCCCAUCUCAGG | 618 | ABE/CBE/CABE |
| | class-I | GUG | | |
| sgRNA991 | HLA | CUCCUUACCCCAUCUCAG | 619 | ABE/CBE/CABE |
| | class-I | GGUG | | |
| sgRNA992 | HLA | CUUACCCCAUCUCAGGGU | 620 | ABE/CBE/CABE |
| | class-I | G | | |
| sgRNA993 | HLA | UUACCCCAUCUCAGGGUG | 621 | ABE/CBE/CABE |
| | class-I | | | |
| sgRNA994 | HLA | CCUUACCCCAUCUCAGGG | 622 | ABE/CBE/CABE |
| | class-I | UGA | | |
| sgRNA995 | HLA | UCACCCUGAGAUGGGGUA | 623 | ABE/CBE/CABE |
| | class-I | AGGA | | |
| sgRNA996 | HLA | UUACCCCAUCUCAGGGUG | 624 | ABE/CBE/CABE |
| | class-I | A | | |
| sgRNA997 | HLA | UACCCCAUCUCAGGGUGA | 625 | ABE/CBE/CABE |
| | class-I | | | |

### Nucleobase Editors

[0252] Useful in the methods and compositions described herein are nucleobase editors that edit, modify or alter a target nucleotide sequence of a polynucleotide. Nucleobase editors described herein typically include a polynucleotide programmable nucleotide binding domain and a nucleobase editing domain (e.g., adenosine deaminase, cytidine deaminase, or a dual deaminase). A polynucleotide programmable nucleotide binding domain, when in conjunction with a bound guide polynucleotide (e.g., gRNA), can specifically bind to a target polynucleotide sequence and 10 thereby localize the base editor to the target nucleic acid sequence desired to be edited.

### Polynucleotide Programmable Nucleotide Binding Domain

[0253] Polynucleotide programmable nucleotide binding domains bind polynucleotides (e.g., RNA, DNA). A polynucleotide programmable nucleotide binding domain of a base editor can itself comprise one or more domains (e.g., one or more nuclease domains). In some embodiments, the nuclease domain of a polynucleotide programmable nucleotide binding domain comprises an endonuclease or an exonuclease.

[0254] Disclosed herein are base editors comprising a polynucleotide programmable nucleotide binding domain comprising all or a portion (e.g., a functional portion) of a CRISPR protein (i.e., a base editor comprising as a domain all or a portion (e.g., a functional portion) of a CRISPR protein (e.g., a Cas protein), also referred to as a “CRISPR protein-derived domain” of the base editor). A CRISPR protein-derived domain incorporated into a base editor can be modified compared to a wild-type or natural version of the CRISPR protein. A CRISPR protein-derived domain can comprise one or more mutations, insertions, deletions, rearrangements and/or recombinations relative to a wild-type or natural version of the CRISPR protein.

[0255] Cas proteins that can be used herein include class 1 and class 2. Non-limiting examples of Cas proteins include Cas1, Cas1B, Cas2, Cas3, Cas4, Cas5, Cas5d, Cas5t, Cas5h, Cas5a, Cas6, Cas7, Cas8, Cas9 (also known as Csn1 or Csx12), Cas10, Csy1, Csy2, Csy3, Csy4, Cse1, Cse2, Cse3, Cse4, Cse5e, Csc1, Csc2, Csa5, Csn1, Csn2, Csm1, Csm2, Csm3, Csm4, Csm5, Csm6, Cmr1, Cmr3, Cmr4, Cmr5, Cmr6, Csb1, Csb2, Csb3, Csx17, Csx14, Csx10, Csx16, CsaX, Csx3, Csx1, Csx1S, Csf1, Csf2, CsO, Csf4, Csd1, Csd2, Cst1, Cst2, Csh1, Csh2, Csa1, Csa2, Csa3, Csa4, Csa5, Cas12a/Cpf1, Cas12b/C2c1 (e.g., SEQ ID NO: 232), Cas12c/C2c3, Cas12d/CasY, Cas12e/CasX, Cas12g, Cas12h, Cas12i, and Cas12j/CasΦ, CARF, DinG, homologues thereof, or modified versions thereof. A CRISPR enzyme can direct cleavage of one or both strands at a target sequence, such as within a target sequence and/or within a complement of a target sequence. For example, a CRISPR enzyme can direct cleavage of one or both strands within about 1, 2, 3, 4, 5, 6, 7, 8, 9, 10, 15, 20, 25, 50, 100, 200, 500, or more base pairs from the first or last nucleotide of a target sequence.

[0256] A vector that encodes a CRISPR enzyme that is mutated to with respect to a corresponding wild-type enzyme such that the mutated CRISPR enzyme lacks the ability to cleave one or both strands of a target polynucleotide containing a target sequence can be used. A Cas protein (e.g., Cas9, Cas12) or a Cas domain (e.g., Cas9, Cas12) can refer to a polypeptide or domain with at least or at least about 50%, 60%, 70%, 80%, 90%, 91%, 92%, 93%, 94%, 95%, 96%, 97%, 98%, 99%, or 100% sequence identity and/or sequence homology to a wild-type exemplary Cas polypeptide or Cas domain. Cas (e.g., Cas9, Cas12) can refer to the wild-type or a modified form of the Cas protein that can comprise an amino acid change such as a deletion, insertion, substitution, variant, mutation, fusion, chimera, or any combination thereof. In some embodiments, a CRISPR protein-derived domain of a base editor can include all or a portion (e.g., a functional portion) of Cas9 from Corynebacterium ulcerans (NCBI Refs: NC_015683.1, NC_017317.1); Corynebacterium diphtheria (NCBI Refs: NC_016782.1, NC_016786.1); Spiroplasma syrphidicola (NCBI Ref: NC_021284.1); Prevotella intermedia (NCBI Ref: NC_017861.1); Spiroplasma taiwanense (NCBI Ref: NC_021846.1); Streptococcus iniae (NCBI Ref: NC_021314.1); Belliella baltica (NCBI Ref: NC_018010.1); Psychroflexus torquis (NCBI Ref: NC_018721.1); Streptococcus thermophilus (NCBI Ref: YP_820832.1); Listeria innocua (NCBI Ref: NP_472073.1); Campylobacter jejuni (NCBI Ref: YP_002344900.1); Neisseria meningitidis (NCBI Ref: YP_002342100.1), Streptococcus pyogenes, or Staphylococcus aureus.

[0257] Some aspects of the disclosure provide high fidelity Cas9 domains. High fidelity Cas9 domains are known in the art and described, for example, in Kleinstiver, B. P., et al. “High-fidelity CRISPR-Cas9 nucleases with no detectable genome-wide off-target effects.” Nature 529, 490-495 (2016); and Slaymaker, I. M., et al. “Rationally engineered Cas9 nucleases with improved specificity.” Science 351, 84-88 (2015); the entire contents of each of which are incorporated herein by reference. An Exemplary high fidelity Cas9 domain is provided in the Sequence Listing as SEQ ID NO: 233.

[0258] In some embodiments, any of the Cas9 fusion proteins or complexes provided herein comprise one or more of a D10A, N497X, a R661X, a Q695X, and/or a Q926X mutation, or a corresponding mutation in any of the amino acid sequences provided herein, wherein X is any amino acid.

[0259] Typically, Cas9 proteins, such as Cas9 from S. pyogenes (spCas9), require a “protospacer adjacent motif (PAM)” or PAM-like motif, which is a 2-6 base pair DNA sequence immediately following the DNA sequence targeted by the Cas9 nuclease in the CRISPR bacterial adaptive immune system. The presence of an NGG PAM sequence is required to bind a particular nucleic acid region, where the “N” in “NGG” is adenosine (A), thymidine (T), or cytosine (C), and the G is guanosine. In some embodiments, any of the fusion proteins or complexes provided herein may contain a Cas9 domain that is capable of binding a nucleotide sequence that does not contain a canonical (e.g., NGG) PAM sequence. Cas9 domains that bind to non-canonical PAM sequences have been described in the art and would be apparent to the skilled artisan. For example, Cas9 domains that bind non-canonical PAM sequences have been described in Kleinstiver, B. P., et al., “Engineered CRISPR-Cas9 nucleases with altered PAM specificities” Nature 523, 481-485 (2015); and Kleinstiver, B. P., et al., “Broadening the targeting range of Staphylococcus aureus CRISPR-Cas9 by modifying PAM recognition” Nature Biotechnology 33, 1293-1298 (2015); the entire contents of each are hereby incorporated by reference.

[0260] In some embodiments, the napDNAbp is a circular permutant (e.g., SEQ ID NO: 238).

[0261] In some embodiments, the polynucleotide programmable nucleotide binding domain comprises a nickase domain. Herein the term “nickase” refers to a polynucleotide programmable nucleotide binding domain comprising a nuclease domain that is capable of cleaving only one strand of the two strands in a duplexed nucleic acid molecule (e.g., DNA). For example, where a polynucleotide programmable nucleotide binding domain comprises a nickase domain derived from Cas9, the Cas9-derived nickase domain can include a D10A mutation and a histidine at position 840. In another example, a Cas9-derived nickase domain comprises an H840A mutation, while the amino acid residue at position 10 remains a D.

[0262] In some embodiments, a Cas9 nuclease has an inactive (e.g., an inactivated) DNA cleavage domain, that is, the Cas9 is a nickase, referred to as an “nCas9” protein (for “nickase” Cas9; SEQ ID NO: 201). The Cas9 nickase may be a Cas9 protein that is capable of cleaving only one strand of a duplexed nucleic acid molecule (e.g., a duplexed DNA molecule). In some embodiments the Cas9 nickase comprises an amino acid sequence that is at least 60%, at least 65%, at least 70%, at least 75%, at least 80%, at least 85%, at least 90%, at least 95%, at least 96%, at least 97%, at least 98%, at least 99%, or at least 99.5% identical to any one of the Cas9 nickases provided herein. Additional suitable Cas9 nickases will be apparent to those of skill in the art based on this disclosure and knowledge in the field and are within the scope of this disclosure.

[0263] Also provided herein are base editors comprising a polynucleotide programmable nucleotide binding domain which is catalytically dead (i.e., incapable of cleaving a target polynucleotide sequence). For example, in the case of a base editor comprising a Cas9 domain, the Cas9 can comprise both a D10A mutation and an H840A mutation. In further embodiments, a catalytically dead polynucleotide programmable nucleotide binding domain comprises a point mutation (e.g., D10A or H840A) as well as a deletion of all or a portion (e.g., a functional portion) of a nuclease domain. dCas9 domains are known in the art and described, for example, in Qi et al., “Repurposing CRISPR as an RNA-guided platform for sequence-specific control of gene expression.” Cell. 2013; 152 (5): 1173-83, the entire contents of which are incorporated herein by reference.

[0264] The term “protospacer adjacent motif (PAM)” or PAM-like motif refers to a 2-6 base pair DNA sequence immediately following the DNA sequence targeted by a nucleic acid programmable DNA binding protein. In some embodiments, the PAM can be a 5′ PAM (i.e., located upstream of the 5′ end of the protospacer). In other embodiments, the PAM can be a 3′ PAM (i.e., located downstream of the 5′ end of the protospacer). The PAM sequence can be any PAM sequence known in the art. Suitable PAM sequences include, but are not limited to, NGG, NGA, NGC, NGN, NGT, NGTT, NGCG, NGAG, NGAN, NGNG, NGCN, NGCG, NGTN, NNGRRT, NNNRRT, NNGRR (N), TTTV, TYCV, TYCV, TATV, NNNNGATT, NNAGAAW, or NAAAAC. Y is a pyrimidine; N is any nucleotide base; W is A or T.

[0265] A base editor provided herein can comprise a CRISPR protein-derived domain that is capable of binding a nucleotide sequence that contains a canonical or non-canonical protospacer adjacent motif (PAM) sequence.

[0266] In some embodiments, the PAM is an “NRN” PAM where the “N” in “NRN” is adenine (A), thymine (T), guanine (G), or cytosine (C), and the R is adenine (A) or guanine (G); or the PAM is an “NYN” PAM, wherein the “N” in NYN is adenine (A), thymine (T), guanine (G), or cytosine (C), and the Y is cytidine (C) or thymine (T), for example, as described in R. T. Walton et al., 2020, Science, 10.1126/science.aba8853 (2020), the entire contents of which are incorporated herein by reference.

[0267] Several PAM variants are described in Table 3 below.

TABLE 3
Cas9 proteins and corresponding PAM sequences.
N is A, C, T, or G; and V is A, C, or G.

| Variant | PAM |
|---|---|
| spCas9 | NGG |
| spCas9-VRQR | NGA |
| spCas9-VRER | NGCG |
| xCas9 (sp) | NGN |
| saCas9 | NNGRRT |
| saCas9-KKH | NNNRRT |
| spCas9-MQKSER | NGCG |
| spCas9-MQKSER | NGCN |
| spCas9-LRKIQK | NGTN |
| spCas9-LRVSQK | NGTN |
| spCas9-LRVSQL | NGTN |
| spCas9-MQKFRAER | NGC |
| Cpf1 | 5′ (TTTV) |
| SpyMac | 5′-NAA-3′ |

[0268] In some embodiments, the PAM is NGC. In some embodiments, the NGC PAM is recognized by a Cas9 variant. In some embodiments, the NGC PAM Cas9 variant includes one or more amino acid substitutions selected from D1135M, S1136Q, G1218K, E1219F, A1322R, D1332A, R1335E, and T1337R (collectively termed “MQKFRAER”) of spCas9 (SEQ ID No: 197), or a corresponding mutation in another Cas9. In some embodiments, the Cas9 variant contains one or more amino acid substitutions selected from D1135V, G1218R, R1335Q, and T1337R (collectively termed VRQR) of spCas9 (SEQ ID No: 197), or a corresponding mutation in another Cas9. In some embodiments, the Cas9 variant contains one or more amino acid substitutions selected from D1135V, G1218R, R1335E, and T1337R (collectively termed VRER) of spCas9 (SEQ ID No: 197), or a corresponding mutation in another Cas9. In some embodiments, the Cas9 variant contains one or more amino acid substitutions selected from E782K, N968K, and R1015H (collectively termed KHH) of saCas9 (SEQ ID NO: 218). In some embodiments, the Cas9 variant includes one or more amino acid substitutions selected from D1135M, S1136Q, G1218K, E1219S, R1335E, and T1337R (collectively termed “MQKSER”) of spCas9 (SEQ ID No: 197), or a corresponding mutation in another Cas9. In some embodiments, the Cas9 variant includes one or more amino acid substitutions selected from D1135M, S1136Q, G1218K, E1219S, R1335E, and T1337R (collectively termed “MQKSER”) of spCas9 (SEQ ID No: 197), or a corresponding mutation in another Cas9.

[0269] In some embodiments, a CRISPR protein-derived domain of a base editor comprises all or a portion (e.g., a functional portion) of a Cas9 protein with a canonical PAM sequence (NGG). In other embodiments, a Cas9-derived domain of a base editor can employ a non-canonical PAM sequence. Such sequences have been described in the art and would be apparent to the skilled artisan. For example, Cas9 domains that bind non-canonical PAM sequences have been described in Kleinstiver, B. P., et al., “Engineered CRISPR-Cas9 nucleases with altered PAM specificities” Nature 523, 481-485 (2015); and Kleinstiver, B. P., et al., “Broadening the targeting range of Staphylococcus aureus CRISPR-Cas9 by modifying PAM recognition” Nature Biotechnology 33, 1293-1298 (2015); R. T. Walton et al. “Unconstrained genome targeting with near-PAMless engineered CRISPR-Cas9 variants” Science 10.1126/science.aba8853 (2020); Hu et al. “Evolved Cas9 variants with broad PAM compatibility and high DNA specificity,” Nature, 2018 Apr. 5, 556 (7699), 57-63; Miller et al., “Continuous evolution of SpCas9 variants compatible with non-G PAMs” Nat. Biotechnol., 2020 April; 38 (4): 471-481; the entire contents of each are hereby incorporated by reference.

Fusion Proteins or Complexes Comprising a NapDNAbp and a Cytidine Deaminase and/or Adenosine Deaminase

[0270] Some aspects of the disclosure provide fusion proteins or complexes comprising a Cas9 domain or other nucleic acid programmable DNA binding protein (e.g., Cas12) and one or more cytidine deaminase, adenosine deaminase, or cytidine adenosine deaminase domains. It should be appreciated that the Cas9 domain may be any of the Cas9 domains or Cas9 proteins (e.g., dCas9 or nCas9) provided herein. In some embodiments, any of the Cas9 domains or Cas9 proteins (e.g., dCas9 or nCas9) provided herein may be fused with any of the cytidine deaminases and/or adenosine deaminases provided herein. The domains of the base editors disclosed herein can be arranged in any order.

[0271] In some embodiments, the fusion proteins or complexes comprising a cytidine deaminase or adenosine deaminase and a napDNAbp (e.g., Cas9 or Cas12 domain) do not include a linker sequence. In some embodiments, a linker is present between the cytidine or adenosine deaminase and the napDNAbp. In some embodiments, cytidine or adenosine deaminase and the napDNAbp are fused via any of the linkers provided herein. For example, in some embodiments the cytidine or adenosine deaminase and the napDNAbp are fused via any of the linkers provided herein.

[0272] It should be appreciated that the fusion proteins or complexes of the present disclosure may comprise one or more additional features. For example, in some embodiments, the fusion protein or complex may comprise inhibitors, cytoplasmic localization sequences, export sequences, such as nuclear export sequences, or other localization sequences, as well as sequence tags that are useful for solubilization, purification, or detection of the fusion proteins or complexes. Suitable protein tags provided herein include, but are not limited to, biotin carboxylase carrier protein (BCCP) tags, myc-tags, calmodulin-tags, FLAG-tags, hemagglutinin (HA)-tags, polyhistidine tags, also referred to as histidine tags or His-tags, maltose binding protein (MBP)-tags, nus-tags, glutathione-S-transferase (GST)-tags, green fluorescent protein (GFP)-tags, thioredoxin-tags, S-tags, Softags (e.g., Softag 1, Softag 3), strep-tags, biotin ligase tags, FlAsH tags, V5 tags, and SBP-tags. Additional suitable sequences will be apparent to those of skill in the art. In some embodiments, the fusion protein or complex comprises one or more His tags.

[0273] Exemplary, yet nonlimiting, fusion proteins are described in International PCT Application Nos. PCT/US2017/045381, PCT/US2019/044935, and PCT/US2020/016288, each of which is incorporated herein by reference for its entirety.

Fusion Proteins or Complexes with Internal Insertions

[0274] Provided herein are fusion proteins or complexes comprising a heterologous polypeptide fused to a nucleic acid programmable nucleic acid binding protein, for example, a napDNAbp. The heterologous polypeptide can be fused to the napDNAbp at a C-terminal end of the napDNAbp, an N-terminal end of the napDNAbp, or inserted at an internal location of the napDNAbp. In some embodiments, the heterologous polypeptide is a deaminase (e.g., cytidine or adenosine deaminase) or a functional fragment thereof. For example, a fusion protein can comprise a deaminase flanked by an N-terminal fragment and a C-terminal fragment of a Cas9 or Cas12 (e.g., Cas12b/C2c1), polypeptide.

[0275] The deaminase can be a circular permutant deaminase. In some embodiments, the deaminase is a circular permutant TadA, circularly permutated at amino acid residue 116, 136, or 65 as numbered in a TadA reference sequence.

[0276] The fusion protein or complexes can comprise more than one deaminase. The fusion protein or complex can comprise, for example, 1, 2, 3, 4, 5 or more deaminases. The deaminases in a fusion protein or complex can be adenosine deaminases, cytidine deaminases, or a combination thereof.

[0277] In some embodiments, the napDNAbp in the fusion protein or complex contains a Cas9 polypeptide or a fragment thereof. The Cas9 polypeptide can be a variant Cas9 polypeptide. The Cas9 polypeptide can be a circularly permuted Cas9 protein.

[0278] The heterologous polypeptide (e.g., deaminase) can be inserted in the napDNAbp (e.g., Cas9 or Cas12 (e.g., Cas12b/C2c1)) at a suitable location, for example, such that the napDNAbp retains its ability to bind the target polynucleotide and a guide nucleic acid. A deaminase (e.g., adenosine deaminase, cytidine deaminase, or adenosine deaminase and cytidine deaminase (dual deaminase)) can be inserted into a napDNAbp without compromising function of the deaminase (e.g., base editing activity) or the napDNAbp (e.g., ability to bind to target nucleic acid and guide nucleic acid).

[0279] In some embodiments, the deaminase (e.g., adenosine deaminase, cytidine deaminase, or adenosine deaminase and cytidine deaminase) is inserted in regions of the Cas9 polypeptide comprising higher than average B-factors (e.g., higher B factors compared to the total protein or the protein domain comprising the disordered region). Cas9 polypeptide positions comprising a higher than average B-factor can include, for example, residues 768, 792, 1052, 1015, 1022, 1026, 1029, 1067, 1040, 1054, 1068, 1246, 1247, and 1248 as numbered in the above Cas9 reference sequence. Cas9 polypeptide regions comprising a higher than average B-factor can include, for example, residues 792-872, 792-906, and 2-791 as numbered in the above Cas9 reference sequence.

[0280] In some embodiments, a heterologous polypeptide (e.g., deaminase) is inserted in a flexible loop of a Cas9 polypeptide. The flexible loop portions can be selected from the group consisting of 530-537, 569-570, 686-691, 943-947, 1002-1025, 1052-1077, 1232-1247, or 1298-1300 as numbered in the above Cas9 reference sequence, or a corresponding amino acid residue in another Cas9 polypeptide. The flexible loop portions can be selected from the group consisting of: 1-529, 538-568, 580-685, 692-942, 948-1001, 1026-1051, 1078-1231, or 1248-1297 as numbered in the above Cas9 reference sequence, or a corresponding amino acid residue in another Cas9 polypeptide.

[0281] A heterologous polypeptide (e.g., adenine deaminase) can be inserted into a Cas9 polypeptide region corresponding to amino acid residues: 1017-1069, 1242-1247, 1052-1056, 1060-1077, 1002-1003, 943-947, 530-537, 568-579, 686-691, 1242-1247, 1298-1300, 1066-1077, 1052-1056, or 1060-1077 as numbered in the above Cas9 reference sequence, or a corresponding amino acid residue in another Cas9 polypeptide.

[0282] A heterologous polypeptide (e.g., adenine deaminase) can be inserted in place of a deleted region of a Cas9 polypeptide. The deleted region can correspond to an N-terminal or C-terminal portion of the Cas9 polypeptide. Exemplary internal fusions base editors are provided in Table 4A below:

TABLE 4A
Insertion loci in Cas9 proteins

| BE ID | Modification | Other ID |
|---|---|---|
| IBE001 | Cas9 TadA ins 1015 | ISLAY01 |
| IBE002 | Cas9 TadA ins 1022 | ISLAY02 |
| IBE003 | Cas9 TadA ins 1029 | ISLAY03 |
| IBE004 | Cas9 TadA ins 1040 | ISLAY04 |
| IBE005 | Cas9 TadA ins 1068 | ISLAY05 |
| IBE006 | Cas9 TadA ins 1247 | ISLAY06 |
| IBE007 | Cas9 TadA ins 1054 | ISLAY07 |
| IBE008 | Cas9 TadA ins 1026 | ISLAY08 |
| IBE009 | Cas9 TadA ins 768 | ISLAY09 |
| IBE020 | delta HNH TadA 792 | ISLAY20 |
| IBE021 | N-term fusion single TadA helix truncated 165-end | ISLAY21 |
| IBE029 | TadA-Circular Permutant116 ins1067 | ISLAY29 |
| IBE031 | TadA- Circular Permutant 136 ins1248 | ISLAY31 |
| IBE032 | TadA- Circular Permutant 136ins 1052 | ISLAY32 |
| IBE035 | delta 792-872 TadA ins | ISLAY35 |
| IBE036 | delta 792-906 TadA ins | ISLAY36 |
| IBE043 | TadA-Circular Permutant 65 ins1246 | ISLAY43 |
| IBE044 | TadA ins C-term truncate2 791 | ISLAY44 |

[0283] A heterologous polypeptide (e.g., deaminase) can be inserted within a structural or functional domain of a Cas9 polypeptide. A heterologous polypeptide (e.g., deaminase) can be inserted between two structural or functional domains of a Cas9 polypeptide. A heterologous polypeptide (e.g., deaminase) can be inserted in place of a structural or functional domain of a Cas9 polypeptide, for example, after deleting the domain from the Cas9 polypeptide. The structural or functional domains of a Cas9 polypeptide can include, for example, RuvC I, RuvC II, RuvC III, Rec1, Rec2, PI, or HNH.

[0284] A fusion protein can comprise a linker between the deaminase and the napDNAbp polypeptide. The linker can be a peptide or a non-peptide linker. For example, the linker can be an XTEN, (GGGS)ₙ (SEQ ID NO: 246), SGGSSGGS (SEQ ID NO: 330), (GGGGS)ₙ (SEQ ID NO: 247), (G)ₙ, (EAAAK)n (SEQ ID NO: 248), (GGS)ₙ, SGSETPGTSESATPES (SEQ ID NO: 249). In some embodiments, the fusion protein comprises a linker between the N-terminal Cas9 fragment and the deaminase. In some embodiments, the fusion protein comprises a linker between the C-terminal Cas9 fragment and the deaminase. In some embodiments, the N-terminal and C-terminal fragments of napDNAbp are connected to the deaminase with a linker. In some embodiments, the N-terminal and C-terminal fragments are joined to the deaminase domain without a linker. In some embodiments, the fusion protein comprises a linker between the N-terminal Cas9 fragment and the deaminase but does not comprise a linker between the C-terminal Cas9 fragment and the deaminase. In some embodiments, the fusion protein comprises a linker between the C-terminal Cas9 fragment and the deaminase but does not comprise a linker between the N-terminal Cas9 fragment and the deaminase.

[0285] In some embodiments, the napDNAbp in the fusion protein or complex is a Cas12 polypeptide, e.g., Cas12b/C2c1, or a functional fragment thereof capable of associating with a nucleic acid (e.g., a gRNA) that guides the Cas12 to a specific nucleic acid sequence. The Cas12 polypeptide can be a variant Cas12 polypeptide. In other embodiments, the N- or C-terminal fragments of the Cas12 polypeptide comprise a nucleic acid programmable DNA binding domain or a RuvC domain. In other embodiments, the fusion protein contains a linker between the Cas12 polypeptide and the catalytic domain. In other embodiments, the amino acid sequence of the linker is GGSGGS (SEQ ID NO: 250) or GSSGSETPGTSESATPESSG (SEQ ID NO: 251). In other embodiments, the linker is a rigid linker. In other embodiments of the above aspects, the linker is encoded by GGAGGCTCTGGAGGAAGC (SEQ ID NO: 252) or GGCTCTTCTGGATCTGAAACACCTGGCACAAGCGAGAGCGCCACCCCTGAGAGCTCTGGC (SEQ ID NO: 253).

[0286] In other embodiments, the fusion protein or complex contains a nuclear localization signal (e.g., a bipartite nuclear localization signal). In other embodiments, the amino acid sequence of the nuclear localization signal is MAPKKKRKVGIHGVPAA (SEQ ID NO: 261). In other embodiments of the above aspects, the nuclear localization signal is encoded by the following sequence:

[0287] ATGGCCCCAAAGAAGAAGCGGAAGGTCGGTATCCACGGAGTCCCAGCAGCC (SEQ ID NO: 262). In other embodiments, the Cas12b polypeptide contains a mutation that silences the catalytic activity of a RuvC domain. In other embodiments, the Cas12b polypeptide contains D574A, D829A and/or D952A mutations.

[0288] In some embodiments, the fusion protein or complex comprises a napDNAbp domain (e.g., Cas12-derived domain) with an internally fused nucleobase editing domain (e.g., all or a portion (e.g., a functional portion) of a deaminase domain, e.g., an adenosine deaminase domain). In some embodiments, the napDNAbp is a Cas12b. In some embodiments, the base editor comprises a BhCas12b domain with an internally fused TadA*8 domain inserted at the loci provided in Table 4B below.

TABLE 4B
Insertion loci in Cas12b proteins

| | Insertion site | Inserted between aa |
|---|---|---|
| BhCas12b | | |
| position 1 | 153 | PS |
| position 2 | 255 | KE |
| position 3 | 306 | DE |
| position 4 | 980 | DG |
| position 5 | 1019 | KL |
| position 6 | 534 | FP |
| position 7 | 604 | KG |
| position 8 | 344 | HF |
| BvCas12b | | |
| position 1 | 147 | PD |
| position 2 | 248 | GG |
| position 3 | 299 | PE |
| position 4 | 991 | GE |
| position 5 | 1031 | KM |
| AaCas12b | | |
| position 1 | 157 | PG |
| position 2 | 258 | VG |
| position 3 | 310 | DP |
| position 4 | 1008 | GE |
| position 5 | 1044 | GK |

[0289] In some embodiments, the base editing system described herein is an ABE with TadA inserted into a Cas9. Polypeptide sequences of relevant ABEs with TadA inserted into a Cas9 are provided in the attached Sequence Listing as SEQ ID NOs: 263-308.

[0290] Exemplary, yet nonlimiting, fusion proteins are described in International PCT Application Nos. PCT/US2020/016285 and U.S. Provisional Application Nos. 62/852,228 and 62/852,224, the contents of which are incorporated by reference herein in their entireties.

### A to G Editing

[0291] In some embodiments, a base editor described herein comprises an adenosine deaminase domain. Such an adenosine deaminase domain of a base editor can facilitate the editing of an adenine (A) nucleobase to a guanine (G) nucleobase by deaminating the A to form inosine (I), which exhibits base pairing properties of G. In some embodiments, an A-to-G base editor further comprises an inhibitor of inosine base excision repair, for example, a uracil glycosylase inhibitor (UGI) domain or a catalytically inactive inosine specific nuclease. Without wishing to be bound by any particular theory, the UGI domain or catalytically inactive inosine specific nuclease can inhibit or prevent base excision repair of a deaminated adenosine residue (e.g., inosine), which can improve the activity or efficiency of the base editor.

[0292] A base editor comprising an adenosine deaminase can act on any polynucleotide, including DNA, RNA and DNA-RNA hybrids. In an embodiment an adenosine deaminase domain of a base editor comprises all or a portion (e.g., a functional portion) of an ADAT comprising one or more mutations which permit the ADAT to deaminate a target A in DNA. For example, the base editor can comprise all or a portion (e.g., a functional portion) of an ADAT from Escherichia coli (EcTadA) comprising one or more of the following mutations: D108N, A106V, D147Y, E155V, L84F, H123Y, 1156F, or a corresponding mutation in another adenosine deaminase. Exemplary ADAT homolog polypeptide sequences are provided in the Sequence Listing as SEQ ID NOs: 1 and 309-315.

[0293] The adenosine deaminase can be derived from any suitable organism (e.g., E. coli). In some embodiments, the adenosine deaminase is from Escherichia coli, Staphylococcus aureus, Salmonella typhi, Shewanella putrefaciens, Haemophilus influenzae, Caulobacter crescentus, or Bacillus subtilis. In some embodiments, the adenine deaminase is a naturally-occurring adenosine deaminase that includes one or more mutations corresponding to any of the mutations provided herein (e.g., mutations in ecTadA). The corresponding residue in any homologous protein can be identified by e.g., sequence alignment and determination of homologous residues. The mutations in any naturally-occurring adenosine deaminase (e.g., having homology to ecTadA) that correspond to any of the mutations described herein (e.g., any of the mutations identified in ecTadA) can be generated accordingly.

[0294] In some embodiments, the adenosine deaminase comprises an amino acid sequence that is at least 60%, at least 65%, at least 70%, at least 75%, at least 80%, at least 85%, at least 90%, at least 95%, at least 96%, at least 97%, at least 98%, at least 99%, or at least 99.5% identical to any one of the amino acid sequences set forth in any of the adenosine deaminases provided herein. It should be appreciated that adenosine deaminases provided herein may include one or more mutations (e.g., any of the mutations provided herein). The disclosure provides any deaminase domains with a certain percent identify plus any of the mutations or combinations thereof described herein. In some embodiments, the adenosine deaminase comprises an amino acid sequence that has 1, 2, 3, 4, 5, 6, 7, 8, 9, 10, 11, 12, 13, 14, 15, 16, 17, 18, 19, 20, 21, 22, 21, 24, 25, 26, 27, 28, 29, 30, 31, 32, 33, 34, 35, 36, 37, 38, 39, 40, 41, 42, 43, 44, 45, 46, 47, 48, 49, 50, or more mutations compared to a reference sequence, or any of the adenosine deaminases provided herein.

[0295] It should be appreciated that any of the mutations provided herein (e.g., based on a TadA reference sequence, such as TadA*7.10 (SEQ ID NO: 1)) can be introduced into other adenosine deaminases, such as E. coli TadA (ecTadA), S. aureus TadA (saTadA), or other adenosine deaminases (e.g., bacterial adenosine deaminases). In some embodiments, the TadA reference sequence is TadA*7.10 (SEQ ID NO: 1). It would be apparent to the skilled artisan that additional deaminases may similarly be aligned to identify homologous amino acid residues that can be mutated as provided herein. Thus, any of the mutations identified in a TadA reference sequence can be made in other adenosine deaminases (e.g., ecTada) that have homologous amino acid residues. It should also be appreciated that any of the mutations provided herein can be made individually or in any combination in a TadA reference sequence or another adenosine deaminase.

[0296] In some embodiments, the adenosine deaminase comprises an alteration or set of alterations selected from those listed in Tables 5A-5E below:

TABLE 5A
Adenosine Deaminase Variants. Residue positions in the E. coli TadA variant
(TadA*) are indicated.

| | 23 | 26 | 36 | 37 | 48 | 49 | 51 | 72 | 84 | 87 | 106 | 108 | 123 | 125 | 142 | 146 | 147 | 152 | 155 | 156 | 157 | 161 |
|---|---|---|---|---|---|---|---|---|---|---|---|---|---|---|---|---|---|---|---|---|---|---|
| TadA*0.1 | W | R | H | N | P | | R | N | L | S | A | D | H | G | A | S | D | R | E | I | K | K |
| TadA*0.2 | W | R | H | N | P | | R | N | L | S | A | D | H | G | A | S | D | R | E | I | K | K |
| TadA*1.1 | W | R | H | N | P | | R | N | L | S | A | N | H | G | A | S | D | R | E | I | K | K |
| TadA*1.2 | W | R | H | N | P | | R | N | L | S | V | N | H | G | A | S | D | R | E | I | K | K |
| TadA*2.1 | W | R | H | N | P | | R | N | L | S | V | N | H | G | A | S | Y | R | V | I | K | K |
| TadA*2.2 | W | R | H | N | P | | R | N | L | S | V | N | H | G | A | S | Y | R | V | I | K | K |
| TadA*2.3 | W | R | H | N | P | | R | N | L | S | V | N | H | G | A | S | Y | R | V | I | K | K |
| TadA*2.4 | W | R | H | N | P | | R | N | L | S | V | N | H | G | A | S | Y | R | V | I | K | K |
| TadA*2.5 | W | R | H | N | P | | R | N | L | S | V | N | H | G | A | S | Y | R | V | I | K | K |
| TadA*2.6 | W | R | H | N | P | | R | N | T | S | V | N | H | G | A | S | Y | R | V | I | K | K |
| TadA*2.7 | W | R | H | N | P | | R | N | L | S | V | N | H | G | A | S | Y | R | V | I | K | K |
| TadA*2.8 | W | R | H | N | P | | R | N | L | S | V | N | H | G | A | S | Y | R | V | I | K | K |
| TadA*2.9 | W | R | H | N | P | | R | N | L | S | V | N | H | G | A | S | Y | R | V | I | K | K |
| TadA*2.10 | W | R | H | N | P | | R | N | L | S | V | N | H | G | A | S | Y | R | V | I | K | K |
| TadA*2.11 | W | R | H | N | P | | R | N | L | S | V | N | H | G | A | S | Y | R | V | I | K | K |
| TadA*2.12 | W | R | H | N | P | | R | N | L | S | V | N | H | G | A | S | Y | R | V | I | K | K |
| TadA*3.1 | W | R | H | N | P | | R | N | F | S | V | N | Y | G | A | S | Y | R | V | F | K | K |
| TadA*3.2 | W | R | H | N | P | | R | N | F | S | V | N | Y | G | A | S | Y | R | V | F | K | K |
| TadA*3.3 | W | R | H | N | P | | R | N | F | S | V | N | Y | G | A | S | Y | R | V | F | K | K |
| TadA*3.4 | W | R | H | N | P | | R | N | F | S | V | N | Y | G | A | S | Y | R | V | F | K | K |
| TadA*3.5 | W | R | H | N | P | | R | N | F | S | V | N | Y | G | A | S | Y | R | V | F | K | K |
| TadA*3.6 | W | R | H | N | P | | R | N | F | S | V | N | Y | G | A | S | Y | R | V | F | K | K |
| TadA*3.7 | W | R | H | N | P | | R | N | F | S | V | N | Y | G | A | S | Y | R | V | F | K | K |
| TadA*3.8 | W | R | H | N | P | | R | N | F | S | V | N | Y | G | A | S | Y | R | V | F | K | K |
| TadA*4.1 | W | R | H | N | P | | R | N | L | S | V | N | H | G | N | S | Y | R | V | I | K | K |
| TadA*4.2 | W | G | H | N | P | | R | N | L | S | V | N | H | G | N | S | Y | R | V | I | K | K |
| TadA*4.3 | W | R | H | N | P | | R | N | F | S | V | N | Y | G | N | S | Y | R | V | F | K | K |
| TadA*5.1 | W | R | L | N | P | | L | N | F | S | V | N | Y | G | A | C | Y | R | V | F | N | K |
| TadA*5.2 | W | R | H | S | P | | R | N | F | S | V | N | Y | G | A | S | Y | R | V | F | K | T |
| TadA*5.3 | W | R | L | N | P | | L | N | I | S | V | N | Y | G | A | C | Y | R | V | F | N | K |
| TadA*5.4 | W | R | H | S | P | | R | N | F | S | V | N | Y | G | A | S | Y | R | V | F | K | T |
| TadA*5.5 | W | R | L | N | P | | L | N | F | S | V | N | Y | G | A | C | Y | R | V | F | N | K |
| TadA*5.6 | W | R | L | N | P | | L | N | F | S | V | N | Y | G | A | C | Y | R | V | F | N | K |
| TadA*5.7 | W | R | L | N | P | | L | N | F | S | V | N | Y | G | A | C | Y | R | V | F | N | K |
| TadA*5.8 | W | R | L | N | P | | L | N | F | S | V | N | Y | G | A | C | Y | R | V | F | N | K |
| TadA*5.9 | W | R | L | N | P | | L | N | F | S | V | N | Y | G | A | C | Y | R | V | F | N | K |
| TadA*5.10 | W | R | L | N | P | | L | N | F | S | V | N | Y | G | A | C | Y | R | V | F | N | K |
| TadA*5.11 | W | R | L | N | P | | L | N | F | S | V | N | Y | G | A | C | Y | R | V | F | N | K |
| TadA*5.12 | W | R | L | N | P | | L | N | F | S | V | N | Y | G | A | C | Y | R | V | F | N | K |
| TadA*5.13 | W | R | H | N | P | | L | D | F | S | V | N | Y | A | A | S | Y | R | V | F | K | K |
| TadA*5.14 | W | R | H | N | S | | L | N | F | C | V | N | Y | G | A | S | Y | R | V | F | K | K |
| TadA*6.1 | W | R | H | N | S | | L | N | F | S | V | N | Y | G | N | S | Y | R | V | F | K | K |
| TadA*6.2 | W | R | H | N | T | V | L | N | F | S | V | N | Y | G | N | S | Y | R | V | F | N | K |
| TadA*6.3 | W | R | L | N | S | | L | N | F | S | V | N | Y | G | A | C | Y | R | V | F | N | K |
| TadA*6.4 | W | R | L | N | S | | L | N | F | S | V | N | Y | G | N | C | Y | R | V | F | N | K |
| TadA*6.5 | W | R | L | N | T | V | L | N | F | S | V | N | Y | G | A | C | Y | R | V | F | N | K |
| TadA*6.6 | W | R | L | N | T | V | L | N | F | S | V | N | Y | G | N | C | Y | R | V | F | N | K |
| TadA*7.1 | W | R | L | N | A | | L | N | F | S | V | N | Y | G | A | C | Y | R | V | F | N | K |
| TadA*7.2 | W | R | L | N | A | | L | N | F | S | V | N | Y | G | N | C | Y | R | V | F | N | K |
| TadA*7.3 | L | R | L | N | A | | L | N | F | S | V | N | Y | G | A | C | Y | R | V | F | N | K |
| TadA*7.4 | R | R | L | N | A | | L | N | F | S | V | N | Y | G | A | C | Y | R | V | F | N | K |
| TadA*7.5 | W | R | L | N | A | | L | N | F | S | V | N | Y | G | A | C | Y | H | V | F | N | K |
| TadA*7.6 | W | R | L | N | A | | L | N | I | S | V | N | Y | G | A | C | Y | P | V | F | N | K |
| TadA*7.7 | L | R | L | N | A | | L | N | F | S | V | N | Y | G | A | C | Y | P | V | F | N | K |
| TadA*7.8 | L | R | L | N | A | | L | N | F | S | V | N | Y | G | N | C | Y | R | V | F | N | K |
| TadA*7.9 | L | R | L | N | A | | L | N | F | S | V | N | Y | G | N | C | Y | P | V | F | N | K |
| TadA*7.10 | R | R | L | N | A | | L | N | F | S | V | N | Y | G | A | C | Y | P | V | F | N | K |

TABLE 5B
TadA*8 Adenosine Deaminase Variants. Residue positions in the E. coli TadA
variant (TadA*) are indicated. Alterations are referenced to TadA*7.10 (first row).

| | 23 | 36 | 48 | 51 | 76 | 82 | 84 | 106 | 108 | 123 | 146 | 147 | 152 | 154 | 155 | 156 | 157 | 166 |
|---|---|---|---|---|---|---|---|---|---|---|---|---|---|---|---|---|---|---|
| TadA*7.10 | R | L | A | L | I | V | F | V | N | Y | C | Y | P | Q | V | F | N | T |
| TadA*8.1 | | | | | | | | | | | | T | | | | | | |
| TadA*8.2 | | | | | | | | | | | | R | | | | | | |
| TadA*8.3 | | | | | | | | | | | | | | S | | | | |
| TadA*8.4 | | | | | | | | | | H | | | | | | | | |
| TadA*8.5 | | | | | | S | | | | | | | | | | | | |
| TadA*8.6 | | | | | | | | | | | | | | | | | | R |
| TadA*8.7 | | | | | | | | | | | | | | R | | | | |
| TadA*8.8 | | | | | | | | | | H | | R | | R | | | | |
| TadA*8.9 | | | | | Y | | | | | | | R | | R | | | | |
| TadA*8.10 | | | | | | | | | | | | R | | R | | | | R |
| TadA*8.11 | | | | | | | | | | | | T | | R | | | | |
| TadA*8.12 | | | | | | | | | | | | T | | S | | | | |
| TadA*8.13 | | | | | Y | | | | | H | | R | | R | | | | |
| TadA*8.14 | | | | | Y | S | | | | | | | | | | | | |
| TadA*8.15 | | | | | | S | | | | | | R | | | | | | |
| TadA*8.16 | | | | | | S | | | | H | | R | | | | | | |
| TadA*8.17 | | | | | | S | | | | | | | | R | | | | |
| TadA*8.18 | | | | | | S | | | | H | | | | R | | | | |
| TadA*8.19 | | | | | | S | | | | H | | R | | R | | | | |
| TadA*8.20 | | | | | Y | S | | | | H | | R | | R | | | | |
| TadA*8.21 | | | | | | | | | | | | R | | S | | | | |
| TadA*8.22 | | | | | | S | | | | | | | | S | | | | |
| TadA*8.23 | | | | | | S | | | | H | | | | | | | | |
| TadA*8.24 | | | | | | S | | | | H | | T | | | | | | |

TABLE 5C
TadA*9 Adenosine Deaminase Variants. Alterations are referenced to TadA*7.10.
Additional details of TadA*9 adenosine deaminases are described in
International PCT Application No. PCT/US2020/049975, which is incorporated
herein by reference in its entirety for all purposes.

| TadA*9 Description | Alterations |
|---|---|
| TadA*9.1 | E25F, V82S, Y123H, T133K, Y147R, Q154R |
| TadA*9.2 | E25F, V82S, Y123H, Y147R, Q154R |
| TadA*9.3 | V82S, Y123H, P124W, Y147R, Q154R |
| TadA*9.4 | L51W, V82S, Y123H, C146R, Y147R, Q154R |
| TadA*9.5 | P54C, V82S, Y123H, Y147R, Q154R |
| TadA*9.6 | Y73S, V82S, Y123H, Y147R, Q154R |
| TadA*9.7 | N38G, V82T, Y123H, Y147R, Q154R |
| TadA*9.8 | R23H, V82S, Y123H, Y147R, Q154R |
| TadA*9.9 | R21N, V82S, Y123H, Y147R, Q154R |
| TadA*9.10 | V82S, Y123H, Y147R, Q154R, A158K |
| TadA*9.11 | N72K, V82S, Y123H, D139L, Y147R, Q154R, |
| TadA*9.12 | E25F, V82S, Y123H, D139M, Y147R, Q154R |
| TadA*9.13 | M70V, V82S, M94V, Y123H, Y147R, Q154R |
| TadA*9.14 | Q71M, V82S, Y123H, Y147R, Q154R |
| TadA*9.15 | E25F, V82S, Y123H, T133K, Y147R, Q154R |
| TadA*9.16 | E25F, V82S, Y123H, Y147R, Q154R |
| TadA*9.17 | V82S, Y123H, P124W, Y147R, Q154R |
| TadA*9.18 | L51W, V82S, Y123H, C146R, Y147R, Q154R |
| TadA*9.19 | P54C, V82S, Y123H, Y147R, Q154R |
| TadA*9.2 | Y73S, V82S, Y123H, Y147R, Q154R |
| TadA*9.21 | N38G, V82T, Y123H, Y147R, Q154R |
| TadA*9.22 | R23H, V82S, Y123H, Y147R, Q154R |
| TadA*9.23 | R21N, V82S, Y123H, Y147R, Q154R |
| TadA*9.24 | V82S, Y123H, Y147R, Q154R, A158K |
| TadA*9.25 | N72K, V82S, Y123H, D139L, Y147R, Q154R, |
| TadA*9.26 | E25F, V82S, Y123H, D139M, Y147R, Q154R |
| TadA*9.27 | M70V, V82S, M94V, Y123H, Y147R, Q154R |
| TadA*9.28 | Q71M, V82S, Y123H, Y147R, Q154R |
| TadA*9.29 | E25F_I76Y_V82S_Y123H_Y147R_Q154R |
| TadA*9.30 | I76Y_V82T_Y123H_Y147R_Q154R |
| TadA*9.31 | N38G_I76Y_V82S_Y123H_Y147R_Q154R |
| TadA*9.32 | N38G_I76Y_V82T_Y123H_Y147R_Q154R |
| TadA*9.33 | R23H_I76Y_V82S_Y123H_Y147R_Q154R |
| TadA*9.34 | P54C_I76Y_V82S_Y123H_Y147R_Q154R |
| TadA*9.35 | R21N_I76Y_V82S_Y123H_Y147R_Q154R |
| TadA*9.36 | I76Y_V82S_Y123H_D138M_Y147R_Q154R |
| TadA*9.37 | Y72S_I76Y_V82S_Y123H_Y147R_Q154R |
| TadA*9.38 | E25F_I76Y_V82S_Y123H_Y147R_Q154R |
| TadA*9.39 | I76Y_V82T_Y123H_Y147R_Q154R |
| TadA*9.40 | N38G_I76Y_V82S_Y123H_Y147R_Q154R |
| TadA*9.41 | N38G_I76Y_V82T_Y123H_Y147R_Q154R |
| TadA*9.42 | R23H_I76Y_V82S_Y123H_Y147R_Q154R |
| TadA*9.43 | P54C_I76Y_V82S_Y123H_Y147R_Q154R |
| TadA*9.44 | R21N_I76Y_V82S_Y123H_Y147R_Q154R |
| TadA*9.45 | I76Y_V82S_Y123H_D138M_Y147R_Q154R |
| TadA*9.46 | Y72S_I76Y_V82S_Y123H_Y147R_Q154R |
| TadA*9.47 | N72K_V82S, Y123H, Y147R, Q154R |
| TadA*9.48 | Q71M_V82S, Y123H, Y147R, Q154R |
| TadA*9.49 | M70V, V82S, M94V, Y123H, Y147R, Q154R |
| TadA*9.50 | V82S, Y123H, T133K, Y147R, Q154R |
| TadA*9.51 | V82S, Y123H, T133K, Y147R, Q154R, A158K |
| TadA*9.52 | M70V, Q71M, N72K, V82S, Y123H, Y147R, Q154R |
| TadA*9.53 | N72K_V82S, Y123H, Y147R, Q154R |
| TadA*9.54 | Q71M_V82S, Y123H, Y147R, Q154R |
| TadA*9.55 | M70V, V82S, M94V, Y123H, Y147R, Q154R |
| TadA*9.56 | V82S, Y123H, T133K, Y147R, Q154R |
| TadA*9.57 | V82S, Y123H, T133K, Y147R, Q154R, A158K |
| TadA*9.58 | M70V, Q71M, N72K, V82S, Y123H, Y147R, Q154R |

[0297] In some embodiments, the adenosine deaminase comprises a TadA*8.20 adenosine deaminase variant further comprising an F149Y amino acid alteration. In some embodiments, the adenosine deaminase comprises a TadA*8.20 adenosine deaminase variant further comprising the amino acid alterations R147D, F149Y, T166I, and D167N (TadA*8.10+). In some embodiments, the adenosine deaminase comprises a TadA*8.20 adenosine deaminase variant further comprising the amino acid alterations S82T and F149Y (TadA*9v1). In some embodiments, the adenosine deaminase comprises a TadA*8.20 adenosine deaminase variant further comprising the amino acid alterations Y147D, F149Y, T166I, D167N and S82T (TadA*9v2).

[0298] In some embodiments, the adenosine deaminase comprises one or more of MII, S2A, S2E, V4D, V4E, V4M, F6S, H8E, H8Y, E9Y, M12S, R13H, R13I, R13Y, T17L, T17S, L18A, L18E, A19N, R21N, K20K, K20R, R21A, G22P, W23D, R23H, W23G, W23Q, W23L, W23R, D24E, D24G, E25F, E25M, E25D, E25A, E25G, E25R, E25V, E25S, E25Y, R26D, R26E, R26G, R26N, R26Q, R26C, R26L, R26K, R26W, E27V, E27D, P29V, V30G, L34S, L34V, L36H, H36L, H36N, N37N, N37T, N37S, N38G, N38R, W45A, W45L, W45N, N46N, R46W, R46F, R46Q, R46M, R47A, R47Q, R47F, R47K, R47P, R47W, R47M, P48T, P48L, P48A, P48I, P48S, 149G, 149H, 149V, 149F, 149H, G50L, R51H, R51L, R51N, L51W, R51Y, H52D, H52Y, D53P, P54C, P54T, A55H, T55A, A56E, A56S, E59A, E59G, E59I, E59Q, E59W, M61A, M61I, M61L, M61V, L63S, L63V, Q65V, G66C, G67D, G67L, G67V, L68Q, M70H, M70Q, L84F, M70V, M70L, E70A, M70V, Q71M, Q7IN, Q71L, Q71R, N72A, N72K, N72S, N72D, N72Y, Y73G, Y73I, Y73K, Y73R, Y73S, R74A, R74Q, R74G, R74K, R74L, R74N, I76D, I76F, 1761, 176N, I76T, I76Y, D77G, A78I, T79M, L80M, L80Y, V82A, V82S, V82G, V82T, L84E, L84F, L84Y, E85K, E85G, E85P, E85S, S87C, S87L, S87V, V88A, V88M, C90S, A91A, A91G, A91S, A91V, A91T, G92T, A93I, M94A, M94V, M94L, M94I, M94H, 195S, 195G, 195L, 195H, 195V, H96A, H96L, H96R, H96S, S97C, S97G, S971, S97M, S97R, S97S, R98K, R98I, R98N, R98Q, G100R, G100V, R101V, R101R, V102A, V102F, V102I, V102V, D103A, F104G, D104N, F104V, F104I, F104L, A106T, V106Q, V106F, V106W, V106M, A106A, A106Q, A106F, A106G, A106W, A106M, A106V, A106R, R107C, R107G, R107P, R107K, R107A, R107N, R107W, R107H, R107S, D108N, D108F, D108G, D108V, D108A, D108Y, D108H, D108I, D108K, D108L, D108M, D108Q, N108Q, N108F, N108W, N108M, N108K, D108K, D108F, D108M, D108Q, D108R, D108W, D108S, A109H, A109K, A109R, A109S, A109T, A109V, K110G, K110H, K110I, K110R, K110T, T111A, T111G, T111H, T111R, G112A, A114G, A114H, A114V, G115S, L117M, L117N, L117V, M118D, M118G, M118K, M118N, M118V, D119L, D119N, D119S, D119V, V120H, V120L, H122H, H122N, H122P, H122R, H122S, H122Y, H123C, H123G, H123P, H123V, H123Y, Y123H, P124G, P124I, P124L, P124W, G125H, G125I, G125A, G125M, G125K, M126D, M126H, M126K, M126I, M126N, M1260, M126S, M126Y, N127H, N127S, N127D, N127K, N127R, H128R, R129H, R129Q, R129V, R129I, R129E, R129V, 11321, 1132F, T133V, T133E, T133G, T133K, E134A, E134E, E134G, E134I, G135G, G135V, 1136G, I136L, 1136T, 1137A, 1137D, 1137E, L137M, 1137S, A138D, A138E, A138G, S138A, A138N, A138S, A138T, A138V, A138Y, D139E, D139I, D139C, D139L, D139M, E140A, E140C, E140L, E140R, A142N, A142D, A142G, A142A, A142L, A142S, A142T, A142N, A142S, A142V, A143D, A143E, A143G, A143D, A143G, A143E, A143L, A143W, A143M, A143S, A143Q, A143R, C146R, S146A, S146C, S146D, S146F, S146R, S146T, D147D, D147L, D147F, D147G, D147Y, Y147T, Y147R, Y147D, D147R, F148L, F148F, F148R, F148Y, F149C, F149M, F149R, F149Y, M151F, M151P, M151R, M151V, R152C, R152F, R152H, R152P, R152R, R153C, R153Q, R153R, R153V, Q154E, Q154H, Q154M, Q154R, Q154L, Q154S, Q154V, E155F, E155G, E155I, E155K, E155P, E155V, E155D, 1156A, 1156F, 1156D, 1156K, 1156N, 1156R, 1156Y, E157A, E157F, E157I, E157P, E157T, E157V, N157K, K157N, K157R, A158Q, A158K, A158V, Q159F, Q159K, Q159L, Q159N, K160A, K160S, K160E, K160K, K160N, K161I, K161A, K161N, K161Q, K161S, K161T, A162D, A162Q, R162H, R162P, A162S, Q163G, Q163H, Q163N, Q163R, S164I, S164R, S164Y, S165A, S165D, S165I, S165T, S165Y, T166D, T166K, T166I, T166N, T166P, T166R, D167S and/or D167N mutation in a TadA reference sequence (e.g., TadA*7.10, ecTadA, or TadA8e), and any alternative mutation at the corresponding position, or any substitution from R26, W23, E27, H36, R47, P48, R51, H52, R74, I76, V82, V88, M94, 195, H96, A106, D108, A109, K110, T111, A114, D119, H122, H123, M126, N127, A142, S146, D147, F149, R152, Q154, E155, 1156, E157, K161, T166, and/or D167, with respect to a TadA reference sequence, or a substitution of 2-50 amino acids in a TadA reference sequence, which may be selected from W23R, E27D, H36L, R47K, P48A, R51H, R51L, I76F, I76Y, V82S, A106V, D108G, A109S, K110R, T111H, A114V, D119N, H122R, H122N, H123Y, M126I, N127K, S146C, D147R, R152P, Q154R, E155V, 1156F,K157N, K161N, T166I, and D167N, or one or more corresponding mutations in another adenosine deaminase. Additional mutations are described in U.S. Patent Application Publication No. 2022/0307003 A1 and International Patent Application Publications No. WO 2023/288304 A2 and WO 2023/034959 A2, the disclosures of which are incorporated herein by reference in their entirety for all purposes.

[0299] In embodiments, a variant of TadA*7.10 comprises one or more alterations selected from any of those alterations provided herein.

[0300] In particular embodiments, an adenosine deaminase heterodimer comprises a TadA*8 domain and an adenosine deaminase domain selected from Staphylococcus aureus (S. aureus) TadA, Bacillus subtilis (B. subtilis) TadA, Salmonella typhimurium (S. typhimurium) TadA, Shewanella putrefaciens (S. putrefaciens) TadA, Haemophilus influenzae F3031 (H. influenzae) TadA, Caulobacter crescentus (C. crescentus) TadA, Geobacter sulfurreducens (G. sulfurreducens) TadA, or TadA*7.10.

[0301] In some embodiments, the TadA*8 is a variant as shown in Table 5D. Table 5D shows certain amino acid position numbers in the TadA amino acid sequence and the amino acids present in those positions in the TadA-7.10 adenosine deaminase. Table 5D also shows amino acid changes in TadA variants relative to TadA-7.10 following phage-assisted non-continuous evolution (PANCE) and phage-assisted continuous evolution (PACE), as described in M. Richter et al., 2020, Nature Biotechnology, doi.org/10.1038/s41587-020-0453-z, the entire contents of which are incorporated by reference herein. In some embodiments, the TadA*8 is TadA*8a, TadA*8b, TadA*8c, TadA*8d, or TadA*8e. In some embodiments, the TadA*8 is TadA*8e. In one embodiment, an adenosine deaminase is a TadA*8 that comprises or consists essentially of SEQ ID NO: 316 or a fragment thereof having adenosine deaminase activity.

TABLE 5D
Select TadA*8 Variants

| | | TadA amino acid number | | | | | | | | | |
|---|---|---|---|---|---|---|---|---|---|---|---|
| | TadA | 26 | 88 | 109 | 111 | 119 | 122 | 147 | 149 | 166 | 167 |
| | TadA-7.10 | R | V | A | T | D | H | Y | F | T | D |
| PANCE 1 | | | | | R | | | | | | |
| PANCE 2 | | | | S/T | R | | | | | | |
| PACE | TadA-8a | C | | S | R | N | N | D | Y | I | N |
| | TadA-8b | | A | S | R | N | N | | Y | I | N |
| | TadA-8c | C | | S | R | N | N | | Y | I | N |
| | TadA-8d | | A | | R | N | | | Y | | |
| | TadA-8e | | | S | R | N | N | D | Y | I | N |

[0302] In some embodiments, the TadA variant is a variant as shown in Table 5E. Table 5E shows certain amino acid position numbers in the TadA amino acid sequence and the amino acids present in those positions in the TadA*7.10 adenosine deaminase. In some embodiments, the TadA variant is MSP605, MSP680, MSP823, MSP824, MSP825, MSP827, MSP828, or MSP829. In some embodiments, the TadA variant is MSP828. In some embodiments, the TadA variant is MSP829.

TABLE 5E
TadA Variants

| | TadA Amino Acid Number | | | | | | | |
|---|---|---|---|---|---|---|---|---|
| Variant | 36 | 76 | 82 | 147 | 149 | 154 | 157 | 167 |
| TadA-7.10 | L | I | V | Y | F | Q | N | D |
| MSP605 | | | G | T | | S | | |
| MSP680 | | Y | G | T | | S | | |
| MSP823 | H | | G | T | | S | K | |
| MSP824 | | | G | D | Y | S | | N |
| MSP825 | H | | G | D | Y | S | K | N |
| MSP827 | H | Y | G | T | | S | K | |
| MSP828 | | Y | G | D | Y | S | | N |
| MSP829 | H | Y | G | D | Y | S | K | N |

[0303] In particular embodiments, the fusion proteins or complexes comprise a single (e.g., provided as a monomer) TadA* (e.g., TadA*8 or TadA*9). Throughout the present disclosure, an adenosine deaminase base editor that comprises a single TadA* domain is indicates using the terminology ABEm or ABE #m, where “#” is an identifying number (e.g., ABE8.20m), where “m” indicates “monomer.” In some embodiments, the TadA* is linked to a Cas9 nickase. In some embodiments, the fusion proteins or complexes of the disclosure comprise as a heterodimer of a wild-type TadA (TadA(wt)) linked to a TadA*. Throughout the present disclosure, an adenosine deaminase base editor that comprises a single TadA* domain and a TadA (wt) domain is indicates using the terminology ABEd or ABE #d, where “#” is an identifying number (e.g., ABE8.20d), where “d” indicates “dimer.” In other embodiments, the fusion proteins or complexes of the disclosure comprise as a heterodimer of a TadA*7.10 linked to a TadA*. In some embodiments, the base editor is ABE8 comprising a TadA* variant monomer. In some embodiments, the base editor is ABE comprising a heterodimer of a TadA* and a TadA (wt). In some embodiments, the base editor is ABE comprising a heterodimer of a TadA* and TadA*7.10. In some embodiments, the base editor is ABE comprising a heterodimer of a TadA*. In some embodiments, the TadA* is selected from Tables 5A-5E.

[0304] In some embodiments, the adenosine deaminase is expressed as a monomer. In other embodiments, the adenosine deaminase is expressed as a heterodimer. In some embodiments, the deaminase or other polypeptide sequence lacks a methionine, for example when included as a component of a fusion protein. This can alter the numbering of positions. However, the skilled person will understand that such corresponding mutations refer to the same mutation.

[0305] Any of the mutations provided herein and any additional mutations (e.g., based on the ecTadA amino acid sequence) can be introduced into any other adenosine deaminases. Any of the mutations provided herein can be made individually or in any combination in a TadA reference sequence or another adenosine deaminase (e.g., ecTadA).

[0306] Details of A to G nucleobase editing proteins are described in International PCT Application No. PCT/US2017/045381 (WO2018/027078) and Gaudelli, N. M., et al., “Programmable base editing of A·T to G·C in genomic DNA without DNA cleavage” Nature, 551, 464-471 (2017), the entire contents of which are hereby incorporated by reference.

### C to T Editing

[0307] In some embodiments, a base editor disclosed herein comprises a fusion protein or complex comprising cytidine deaminase capable of deaminating a target cytidine (C) base of a polynucleotide to produce uridine (U), which has the base pairing properties of thymine. In some embodiments, for example where the polynucleotide is double-stranded (e.g., DNA), the uridine base can then be substituted with a thymidine base (e.g., by cellular repair machinery) to give rise to a C: G to a T: A transition. In other embodiments, deamination of a C to U in a nucleic acid by a base editor cannot be accompanied by substitution of the U to a T.

[0308] The deamination of a target C in a polynucleotide to give rise to a U is a non-limiting example of a type of base editing that can be executed by a base editor described herein. In another example, a base editor comprising a cytidine deaminase domain can mediate conversion of a cytosine (C) base to a guanine (G) base. For example, a U of a polynucleotide produced by deamination of a cytidine by a cytidine deaminase domain of a base editor can be excised from the polynucleotide by a base excision repair mechanism (e.g., by a uracil DNA glycosylase (UDG) domain), producing an abasic site. The nucleobase opposite the abasic site can then be substituted (e.g., by base repair machinery) with another base, such as a C, by for example a translesion polymerase. Although it is typical for a nucleobase opposite an abasic site to be replaced with a C, other substitutions (e.g., A, G or T) can also occur.

[0309] Accordingly, in some embodiments a base editor described herein comprises a deamination domain (e.g., cytidine deaminase domain) capable of deaminating a target C to a U in a polynucleotide. Further, as described below, the base editor can comprise additional domains which facilitate conversion of the U resulting from deamination to, in some embodiments, a T or a G. For example, a base editor comprising a cytidine deaminase domain can further comprise a uracil glycosylase inhibitor (UGI) domain to mediate substitution of a U by a T, completing a C-to-T base editing event. In another example, the base editor can comprise a uracil stabilizing protein as described herein. In another example, a base editor can incorporate a translesion polymerase to improve the efficiency of C-to-G base editing, since a translesion polymerase can facilitate incorporation of a C opposite an abasic site (i.e., resulting in incorporation of a G at the abasic site, completing the C-to-G base editing event).

[0310] A base editor comprising a cytidine deaminase as a domain can deaminate a target C in any polynucleotide, including DNA, RNA and DNA-RNA hybrids.

[0311] In some embodiments, a cytidine deaminase of a base editor comprises all or a portion (e.g., a functional portion) of an apolipoprotein B mRNA editing complex (APOBEC) family deaminase. APOBEC is a family of evolutionarily conserved cytidine deaminases. Members of this family are C-to-U editing enzymes. The N-terminal domain of APOBEC like proteins is the catalytic domain, while the C-terminal domain is a pseudocatalytic domain. More specifically, the catalytic domain is a zinc dependent cytidine deaminase domain and is important for cytidine deamination. APOBEC family members include APOBEC1, APOBEC2, APOBEC3A, APOBEC3B, APOBEC3C, APOBEC3D (“APOBEC3E” now refers to this), APOBEC3F, APOBEC3G, APOBEC3H, APOBEC4, and Activation-induced (cytidine) deaminase.

[0312] Other exemplary deaminases that can be fused to Cas9 according to aspects of this disclosure are provided below. In embodiments, the deaminases are activation-induced deaminases (AID). It should be understood that, in some embodiments, the active domain of the respective sequence can be used, e.g., the domain without a localizing signal (nuclear localization sequence, without nuclear export signal, cytoplasmic localizing signal).

[0313] Some aspects of the present disclosure are based on the recognition that modulating the deaminase domain catalytic activity of any of the fusion proteins or complexes described herein, for example by making point mutations in the deaminase domain, affect the processivity of the fusion proteins (e.g., base editors) or complexes. For example, mutations that reduce, but do not eliminate, the catalytic activity of a deaminase domain within a base editing fusion protein or complexes can make it less likely that the deaminase domain will catalyze the deamination of a residue adjacent to a target residue, thereby narrowing the deamination window. The ability to narrow the deamination window can prevent unwanted deamination of residues adjacent to specific target residues, which can reduce or prevent off-target effects.

[0314] In some embodiments, an APOBEC deaminase incorporated into a base editor can comprise one or more mutations selected from the group consisting of H121R, H122R, R126A, R126E, R118A, W90A, W90Y, and R132E of rAPOBEC1; D316R, D317R, R320A, R320E, R313A, W285A, W285Y, and R326E of hAPOBEC3G; and any alternative mutation at the corresponding position, or one or more corresponding mutations in another APOBEC deaminase.

[0315] A number of modified cytidine deaminases are commercially available, including, but not limited to, SaBE3, SaKKH-BE3, VQR-BE3, EQR-BE3, VRER-BE3, YE1-BE3, EE-BE3, YE2-BE3, and YEE-BE3, which are available from Addgene (plasmids 85169, 85170, 85171, 85172, 85173, 85174, 85175, 85176, 85177). In some embodiments, a deaminase incorporated into a base editor comprises all or a portion (e.g., a functional portion) of an APOBEC1 deaminase.

[0316] In some embodiments, the fusion proteins or complexes of the disclosure comprise one or more cytidine deaminase domains. In some embodiments, the cytidine deaminases provided herein are capable of deaminating cytosine or 5-methylcytosine to uracil or thymine. In some embodiments, the cytidine deaminases provided herein are capable of deaminating cytosine in DNA. The cytidine deaminase may be derived from any suitable organism. In some embodiments, the cytidine deaminase is a naturally-occurring cytidine deaminase that includes one or more mutations corresponding to any of the mutations provided herein. One of skill in the art will be able to identify the corresponding residue in any homologous protein, e.g., by sequence alignment and determination of homologous residues. Accordingly, one of skill in the art would be able to generate mutations in any naturally-occurring cytidine deaminase that corresponds to any of the mutations described herein. In some embodiments, the cytidine deaminase is from a prokaryote. In some embodiments, the cytidine deaminase is from a bacterium. In some embodiments, the cytidine deaminase is from a mammal (e.g., human).

[0317] In some embodiments, the cytidine deaminase comprises an amino acid sequence that is at least 60%, at least 65%, at least 70%, at least 75%, at least 80%, at least 85%, at least 90%, at least 95%, at least 96%, at least 97%, at least 98%, at least 99%, or at least 99.5% identical to any one of the cytidine deaminase amino acid sequences set forth herein. It should be appreciated that cytidine deaminases provided herein may include one or more mutations (e.g., any of the mutations provided herein). Some embodiments provide a polynucleotide molecule encoding the cytidine deaminase nucleobase editor polypeptide of any previous aspect or as delineated herein. In some embodiments, the polynucleotide is codon optimized.

[0318] In embodiments, a fusion protein of the disclosure comprises two or more nucleic acid editing domains.

[0319] Details of C to T nucleobase editing proteins are described in International PCT Application No. PCT/US2016/058344 (WO2017/070632) and Komor, A. C., et al., “Programmable editing of a target base in genomic DNA without double-stranded DNA cleavage” Nature 533, 420-424 (2016), the entire contents of which are hereby incorporated by reference.

### Cytidine Adenosine Base Editors (CABEs)

[0320] In some embodiments, a base editor described herein comprises an adenosine deaminase variant that has increased cytidine deaminase activity. Such base editors may be referred to as “cytidine adenosine base editors (CABEs)” or “cytosine base editors derived from TadA* (CBE-Ts),” and their corresponding deaminase domains may be referred to as “TadA* acting on DNA cytosine (T_{AD}C)” domains. In some instances, an adenosine deaminase variant has both adenine and cytosine deaminase activity (i.e., is a dual deaminase). In some embodiments, the adenosine deaminase variants deaminate adenine and cytosine in DNA. In some embodiments, the adenosine deaminase variants deaminate adenine and cytosine in single-stranded DNA. In some embodiments, the adenosine deaminase variants deaminate adenine and cytosine in RNA. In some embodiments, the adenosine deaminase variant predominantly deaminates cytosine in DNA and/or RNA (e.g., greater than 30%, 40%, 50%, 60%, 70%, 80%, 90%, 95%, or 99% of all deaminations catalyzed by the adenosine deaminase variant, or the number of cytosine deaminations catalyzed by the variant is about or at least about 2-fold, 3-fold, 4-fold, 5-fold, 6-fold, 7-fold, 8-fold, 9-fold, 10-fold, 25-fold, 50-fold, 75-fold, 100-fold, 500-fold, or 1,000-fold greater than the number adenine deaminations catalyzed by the variant). In some embodiments, the adenosine deaminase variant has approximately equal cytosine and adenosine deaminase activity (e.g., the two activities are within about 10% or 20% of each other). In some embodiments, the adenosine deaminase variant has predominantly cytosine deaminase activity, and little, if any, adenosine deaminase activity. In some embodiments, the adenosine deaminase variant has cytosine deaminase activity, and no significant or no detectable adenosine deaminase activity. In some embodiments, the target polynucleotide is present in a cell in vitro or in vivo. In some embodiments, the cell is a bacteria, yeast, fungi, insect, plant, or mammalian cell.

[0321] In some embodiments, the CABE comprises a bacterial TadA deaminase variant (e.g., ecTadA). In some embodiments, the CABE comprises a truncated TadA deaminase variant. In some embodiments, the CABE comprises a fragment of a TadA deaminase variant. In some embodiments, the CABE comprises a TadA*8.20 variant.

[0322] In some embodiments, an adenosine deaminase variant of the disclosure is a TadA adenosine deaminase comprising one or more alterations that increase cytosine deaminase activity (e.g., at least about 10-fold, 20-fold, 30-fold, 40-fold, 50-fold, 60-fold, 70-fold or more increase) while maintaining adenosine deaminase activity (e.g., at least about 30%, 40%, 50% or more of the activity of a reference adenosine deaminase (e.g., TadA*8.20 or TadA*8.19)). In some instances, the adenosine deaminase variant comprises one or more alterations that increase cytosine deaminase activity (e.g., at least about 10-fold, 20-fold, 30-fold, 40-fold, 50-fold, 60-fold, 70-fold or more increase) relative to the activity of a reference adenosine deaminase and comprise undetectable adenosine deaminase activity or adenosine deaminase activity that is less than 30%, 20%, 10%, or 5% of that of a reference adenosine deaminase. In some embodiments, the reference adenosine deaminase is TadA*8.20 or TadA*8.19.

[0323] In some embodiments, the adenosine deaminase variant is an adenosine deaminase comprising two or more alterations at an amino acid position selected from the group consisting of 2, 4, 6, 8, 13, 17, 23, 27, 29, 30, 47, 48, 49, 67, 76, 77, 82, 84, 96, 100, 107, 112, 114, 115, 118, 119, 122, 127, 142, 143, 147, 149, 158, 159, 162 165, 166, and 167, of an amino acid sequence having at least about 70%, 75%, 80%, 85%, 90%, 95%, 98%, 99% or greater identity to SEQ ID NO: 1, or a corresponding alteration in another deaminase.

[0324] In some embodiments, the adenosine deaminase variant is an adenosine deaminase comprising one or more alterations selected from the group consisting of S2H, V4K, V4S, V4T, V4Y, F6G, F6H, F6Y, H8Q, R13G, T17A, T17W, R23Q, E27C, E27G, E27H, E27K, E27Q, E27S, E27G, P29A, P29G, P29K, V30F, V30I, R47G, R47S, A48G, 149K, 149M, 149N, 149Q, I49T, G67W, I76H, I76R, I76W, Y76H, Y76R, Y76W, F84A, F84M, H96N, G100A, G100K, T111H, G112H, A114C, G115M, M118L, H122G, H122R, H122T, N127I, N127K, N127P, A142E, R147H, A158V, Q159S, A162C, A162N, A162Q, and S165P of an amino acid sequence having at least about 70%, 75%, 80%, 85%, 90%, 95%, 98%, 99% or greater identity to SEQ ID NO: 1, or a corresponding alteration in another deaminase.

[0325] In some embodiments, the adenosine deaminase variant is an adenosine deaminase comprising an amino acid alteration or combination of amino acid alterations selected from those listed in any of Tables 6A-6F.

[0326] The residue identity of exemplary adenosine deaminase variants that are capable of deaminating adenine and/or cytidine in a target polynucleotide (e.g., DNA) is provided in Tables 6A-6F below. Further examples of adenosine deaminase variants include the following variants of 1.17 (see Table 6A): 1.17+E27H; 1.17+E27K; 1.17+E27S; 1.17+E27S+I49K; 1.17+E27G; 1.17+I49N; 1.17+E27G+149N; and 1.17+E27Q. In some embodiments, any of the amino acid alterations provided herein are substituted with a conservative amino acid. Additional mutations known in the art can be further added to any of the adenosine deaminase variants provided herein.

[0327] In some embodiments, the base editor systems comprising a CABE provided herein have at least about a 30%, 40%, 50%, 60%, 70% or more C to T editing activity in a target polynucleotide (e.g., DNA). In some embodiments, a base editor system comprising a CABE as provided herein has an increased C to T base editing activity (e.g., increased at least about 30-fold, 40-fold, 50-fold, 60-fold, 70-fold or more) relative to a reference base editor system comprising a reference adenosine deaminase (e.g., TadA*8.20 or TadA*8.19).

TABLE 6A
Adenosine Deaminase Variants. Mutations are indicated with reference to
TadA*8.20. “S” indicates “Surface,” and “NAS” indicates “Near Active Site.”

| location in structure | N/A | S h1 | S h1 | S h1 | NAS | NAS | NAS | NAS | | S | |
|---|---|---|---|---|---|---|---|---|---|---|---|
| Amino Acid No. (*START Met is AA#1) | 2 | 8 | 13 | 17 | 27 | 47 | 48 | 49 | 67 | 76 | 77 |
| TadA*8.20 | S | H | R | T | E | R | A | I | G | Y | D |
| TadA*8.19 | | | | | | | | | | I | |
| 1.1 | | | | | H | | | | | I | |
| 1.2 | | | | | H | | | K | | I | |
| 1.3 | | | | | S | | | K | | I | |
| 1.4 | | | | | S | | | K | | I | |
| 1.5 | | | | | K | | | | | | |
| 1.6 | | | | | K | | | | | | |
| 1.7 | | | | | H | | | | | I | |
| 1.8 | | | | | S | | | K | W | | |
| 1.9 | | | | | | | | T | W | | |
| 1.10 | | | | | C | | | | | I | |
| 1.11 | | | G | | Q | | | | | | |
| 1.12 | | | | A | H | | | M | | I | |
| 1.13 | | | | | | | | Q | | I | |
| 1.14 | H | | | | | | | K | | I | |
| 1.15 | | | | | | S | | | | | |
| 1.16 | | Q | | | | | | Q | | I | |
| 1.17 | | | | A | | | G | | | | |
| 1.18 | | | | | G | | | | | | |
| 1.19 | | | | | G | | | N | | | |
| 1.20 | | | | | G | | | | | | G |

TABLE 6A
Adenosine Deaminase Variants. Mutations are indicated with reference to
TadA*8.20. “I” indicates “Internal,” “S” indicates “Surface,” and “NAS” indicates “Near Active Site.”

| location in | I | NAS | | NAS | S | | S | S | S | | S | |
|---|---|---|---|---|---|---|---|---|---|---|---|---|
| structure | | | | | | | | | | | | |
| Amino Acid | 82 | 84 | 96 | 107 | 112 | 115 | 118 | 119 | 127 | 142 | 162 | 165 |
| No. (*START | | | | | | | | | | | | |
| Met is AA#1) | | | | | | | | | | | | |
| TadA*8.20 | S | F | H | R | G | G | M | D | N | A | A | S |
| TadA*8.19 | | | | | | | | | | | | |
| 1.1 | | M | | | | | | | | | | |
| 1.2 | | | | | | | | | | | | |
| 1.3 | | | | | | | | | | | | |
| 1.4 | | | | | | | | | | | N | |
| 1.5 | | | | | | | | | | | | |
| 1.6 | | | | | | | | N | | | | |
| 1.7 | | | | | | | | | | | | |
| 1.8 | | | | | | | | | | | | |
| 1.9 | | | N | | | | | | | | | |
| 1.10 | | | | | | | | N | | | | |
| 1.11 | | | | | | | | | K | | | |
| 1.12 | | | | | | | L | | | | | |
| 1.13 | | | | | | M | | | | | | |
| 1.14 | | | | | H | | | | | | | |
| 1.15 | | | | C | | | | | | | | |
| 1.16 | | | | | | | | | | | | |
| 1.17 | T | | | | | | | | | E | | |
| 1.18 | | | | | | | | | | | | |
| 1.19 | | | | | | | | | | | | |
| 1.20 | | | | | | | | | | | | P |

TABLE 6B
Adenosine deaminase variants. Mutations are indicated
with reference to TadA*8.20.

| Position No. | 27 | 29 | 30 | 49 | 82 | 84 | 107 | 112 | 115 | 142 |
|---|---|---|---|---|---|---|---|---|---|---|
| TadA*8.20 | E | P | V | I | S | F | R | G | G | A |
| Alterations | | | | | | | | | | |
| Evaluated | G/S/H | G/A/K | I/L/F | K | T | L/A | C | H | M | E |
| S1.1 | S | | | K | T | | | | | |
| S1.2 | S | | | K | T | | C | | | |
| S1.3 | S | | | K | T | | | H | | |
| S1.4 | S | | | K | T | | | | M | |
| S1.5 | S | | | K | T | | | | | E |
| S1.6 | S | | | K | T | | C | H | | |
| S1.7 | S | | | K | T | | C | | M | |
| S1.8 | S | | | K | T | | C | | | E |
| S1.9 | S | | | K | T | | | H | | E |
| S1.10 | S | | | K | T | | | | M | E |
| S1.11 | S | | | K | T | | C | H | M | E |
| S1.12 | S | | I | K | T | | | | | |
| S1.13 | S | | I | K | T | | C | | | |
| S1.14 | S | | I | K | T | | | H | | |
| S1.15 | S | | I | K | T | | | | M | |
| S1.16 | S | | I | K | T | | | | | E |
| S1.17 | S | | I | K | T | | C | H | | |
| S1.18 | S | | I | K | T | | C | | M | |
| S1.19 | S | | I | K | T | | C | | | E |
| S1.20 | S | | I | K | T | | | H | | E |
| S1.21 | S | | I | K | T | | | | M | E |
| S1.22 | S | | I | K | T | | C | H | M | E |
| S1.23 | S | | L | K | T | | | | | |
| S1.24 | S | | L | K | T | | C | | | |
| S1.25 | S | | L | K | T | | | H | | |
| S1.26 | S | | L | K | T | | | | M | |
| S1.27 | S | | L | K | T | | | | | E |
| S1.28 | S | | L | K | T | | C | H | | |
| S1.29 | S | | L | K | T | | C | | M | |
| S1.30 | S | | L | K | T | | C | | | E |
| S1.31 | S | | L | K | T | | | H | | E |
| S1.32 | S | | L | K | T | | | | M | E |
| S1.33 | S | | L | K | T | | C | H | M | E |
| S1.34 | S | | F | K | T | A | | | | |
| S1.35 | S | | F | K | T | A | C | | | |
| S1.36 | S | | F | K | T | A | | H | | |
| S1.37 | S | | F | K | T | A | | | M | |
| S1.38 | S | | F | K | T | A | | | | E |
| S1.39 | S | | F | K | T | A | C | H | | |
| S1.40 | S | | F | K | T | A | C | | M | |
| S1.41 | S | | F | K | T | A | C | | | E |
| S1.42 | S | | F | K | T | A | | H | | E |
| S1.43 | S | | F | K | T | A | | | M | E |
| S1.44 | S | | F | K | T | A | C | H | M | E |
| S1.45 | S | | | K | T | L | | | | |
| S1.46 | S | | | K | T | L | C | | | |
| S1.47 | S | | | K | T | L | | H | | |
| S1.48 | S | | | K | T | L | | | M | |
| S1.49 | S | | | K | T | L | | | | E |
| S1.50 | S | | | K | T | L | C | H | | |
| S1.51 | S | | | K | T | L | C | | M | |
| S1.52 | S | | | K | T | L | C | | | E |
| S1.53 | S | | | K | T | L | | H | | E |
| S1.54 | S | | | K | T | L | | | M | E |
| S1.55 | S | | | K | T | L | C | H | M | E |
| S1.56 | S | | I | K | T | L | | | | |
| S1.57 | S | | I | K | T | L | C | | | |
| S1.58 | S | | I | K | T | L | | H | | |
| S1.59 | S | | I | K | T | L | | | M | |
| S1.60 | S | | I | K | T | L | | | | E |
| S1.61 | S | | I | K | T | L | C | H | | |
| S1.62 | S | | I | K | T | L | C | | M | |
| S1.63 | S | | I | K | T | L | C | | | E |
| S1.64 | S | | I | K | T | L | | H | | E |
| S1.65 | S | | I | K | T | L | | | M | E |
| S1.66 | S | | I | K | T | L | C | H | M | E |
| S1.67 | S | G | | K | T | | | | | |
| S1.68 | S | G | | K | T | | C | | | |
| S1.69 | S | G | | K | T | | | H | | |
| S1.70 | S | G | | K | T | | | | M | |
| S1.71 | S | G | | K | T | | | | | E |
| S1.72 | S | G | | K | T | | C | H | | |
| S1.73 | S | G | | K | T | | C | | M | |
| S1.74 | S | G | | K | T | | C | | | E |
| S1.75 | S | G | | K | T | | | H | | E |
| S1.76 | S | G | | K | T | | | | M | E |
| S1.77 | S | G | | K | T | | C | H | M | E |
| S1.78 | | G | | K | T | | | | | |
| S1.79 | | G | | K | T | | C | | | |
| S1.80 | | G | | K | T | | | H | | |
| S1.81 | | G | | K | T | | | | M | |
| S1.82 | | G | | K | T | | | | | E |
| S1.83 | | G | | K | T | | C | H | | |
| S1.84 | | G | | K | T | | C | | M | |
| S1.85 | | G | | K | T | | C | | | E |
| S1.86 | | G | | K | T | | | H | | E |
| S1.87 | | G | | K | T | | | | M | E |
| S1.88 | | G | | K | T | | C | H | M | E |
| S1.89 | | K | | K | T | | | | | |
| S1.90 | | K | | K | T | | C | | | |
| S1.91 | | K | | K | T | | | H | | |
| S1.92 | | K | | K | T | | | | M | |
| S1.93 | | K | | K | T | | | | | E |
| S1.94 | | K | | K | T | | C | H | | |
| S1.95 | | K | | K | T | | C | | M | |
| S1.96 | | K | | K | T | | C | | | E |
| S1.97 | | K | | K | T | | | H | | E |
| S1.98 | | K | | K | T | | | | M | E |
| S1.99 | | K | | K | T | | C | H | M | E |
| S1.100 | | K | I | K | T | | | | | |
| S1.101 | | K | I | K | T | | C | | | |
| S1.102 | | K | I | K | T | | | H | | |
| S1.103 | | K | I | K | T | | | | M | |
| S1.104 | | K | I | K | T | | | | | E |
| S1.105 | | K | I | K | T | | C | H | | |
| S1.106 | | K | I | K | T | | C | | M | |
| S1.107 | | K | I | K | T | | C | | | E |
| S1.108 | | K | I | K | T | | | H | | E |
| S1.109 | | K | I | K | T | | | | M | E |
| S1.110 | | K | I | K | T | | C | H | M | E |
| S1.111 | | K | | K | T | L | | | | |
| S1.112 | | K | | K | T | L | C | | | |
| S1.113 | | K | | K | T | L | | H | | |
| S1.114 | | K | | K | T | L | | | M | |
| S1.115 | | K | | K | T | L | | | | E |
| S1.116 | | K | | K | T | L | C | H | | |
| S1.117 | | K | | K | T | L | C | | M | |
| S1.118 | | K | | K | T | L | C | | | E |
| S1.119 | | K | | K | T | L | | H | | E |
| S1.120 | | K | | K | T | L | | | M | E |
| S1.121 | | K | | K | T | L | C | H | M | E |
| S1.122 | | K | I | K | T | L | | | | |
| S1.123 | | K | I | K | T | L | C | | | |
| S1.124 | | K | I | K | T | L | | H | | |
| S1.125 | | K | I | K | T | L | | | M | |
| S1.126 | | K | I | K | T | L | | | | E |
| S1.127 | | K | I | K | T | L | C | H | | |
| S1.128 | | K | I | K | T | L | C | | M | |
| S1.129 | | K | I | K | T | L | C | | | E |
| S1.130 | | K | I | K | T | L | | H | | E |
| S1.131 | | K | I | K | T | L | | | M | E |
| S1.132 | | K | I | K | T | L | C | H | M | E |
| S1.133 | G | | | K | T | | | | | |
| S1.134 | G | | | K | T | | C | | | |
| S1.135 | G | | | K | T | | | H | | |
| S1.136 | G | | | K | T | | | | M | |
| S1.137 | G | | | K | T | | | | | E |
| S1.138 | G | | | K | T | | C | H | | |
| S1.139 | G | | | K | T | | C | | M | |
| S1.140 | G | | | K | T | | C | | | E |
| S1.141 | G | | | K | T | | | H | | E |
| S1.142 | G | | | K | T | | | | M | E |
| S1.143 | G | | | K | T | | C | H | M | E |
| S1.144 | H | | | K | T | | | | | |
| S1.145 | H | | | K | T | | C | | | |
| S1.146 | H | | | K | T | | | H | | |
| S1.147 | H | | | K | T | | | | M | |
| S1.148 | H | | | K | T | | | | | E |
| S1.149 | H | | | K | T | | C | H | | |
| S1.150 | H | | | K | T | | C | | M | |
| S1.151 | H | | | K | T | | C | | | E |
| S1.152 | H | | | K | T | | | H | | E |
| S1.153 | H | | | K | T | | | | M | E |
| S1.154 | H | | | K | T | | C | H | M | E |
| S1.155 | S | | | | T | | | | | |
| S1.156 | S | | | | T | | C | | | |
| S1.157 | S | | | | T | | | H | | |
| S1.158 | S | | | | T | | | | M | |
| S1.159 | S | | | | T | | | | | E |
| S1.160 | S | | | | T | | C | H | | |
| S1.161 | S | | | | T | | C | | M | |
| S1.162 | S | | | | T | | C | | | E |
| S1.163 | S | | | | T | | | H | | E |
| S1.164 | S | | | | T | | | | M | E |
| S1.165 | S | | | | T | | C | H | M | E |
| S1.166 | | A | | | T | | | | | |
| S1.167 | | A | | | T | | C | | | |
| S1.168 | | A | | | T | | | H | | |
| S1.169 | | A | | | T | | | | M | |
| S1.170 | | A | | | T | | | | | E |
| S1.171 | | A | | | T | | C | H | | |
| S1.172 | | A | | | T | | C | | M | |
| S1.173 | | A | | | T | | C | | | E |
| S1.174 | | A | | | T | | | H | | |
| S1.175 | | A | | | T | | | | M | E |
| S1.176 | | A | | | T | | C | H | M | E |
| S1.177 | S | | I | | T | | | | | |
| S1.178 | S | | I | | T | | C | | | |
| S1.179 | S | | I | | T | | | H | | |
| S1.180 | S | | I | | T | | | | M | |
| S1.181 | S | | I | | T | | | | | E |
| S1.182 | S | | I | | T | | C | H | | |
| S1.183 | S | | I | | T | | C | | M | |
| S1.184 | S | | I | | T | | C | | | E |
| S1.185 | S | | I | | T | | | H | | E |
| S1.186 | S | | I | | T | | | | M | E |
| S1.187 | S | | I | | T | | C | H | M | E |
| S1.188 | | A | I | | T | L | | | | |
| S1.189 | | A | I | | T | L | C | | | |
| S1.190 | | A | I | | T | L | | H | | |
| S1.191 | | A | I | | T | L | | | M | |
| S1.192 | | A | I | | T | L | | | | E |
| S1.193 | | A | I | | T | L | C | H | | |
| S1.194 | | A | I | | T | L | C | | M | |
| S1.195 | | A | I | | T | L | C | | | E |
| S1.196 | | A | I | | T | L | | H | | E |
| S1.197 | | A | I | | T | L | | | M | E |
| S1.198 | | A | I | | T | L | C | H | M | E |
| S1.199 | S | A | L | K | T | L | C | H | M | E |

TABLE 6C
Adenosine deaminase variants. Mutations are indicated with reference to variant 1.2 (Table 6A).

| | | Residue identity (START Met is amino | | | | | | | | |
|---|---|---|---|---|---|---|---|---|---|---|
| | | acid #1) | | | | | | | | |
| Variant Name | Alternative Variant Names | 4 | 6 | 17 | 23 | 76 | 77 | 100 | 111 | 114 |
| Reference | 1.2 (see Table 6A) | V | F | T | R | I | D | G | T | A |
| TadAC2.1 | pDKL-135; 2.1 | K | | | | | | | | C |
| TadAC2.2 | pDKL-136; 2.2 | K | | | | | G | | | |
| TadAC2.3 | pDKL-137; 2.3 | | Y | | | | | A | | |
| TadAC2.4 | pDKL-138; 2.4 | T | | | | R | | | | |
| TadAC2.5 | pDKL-139; 2.5 | | Y | | | W | | | | |
| TadAC2.6 | pDKL-140; 2.6 | | Y | | | | | | | |
| TadAC2.7 | pDKL-141; 2.7 | | Y | | | | | | | C |
| TadAC2.8 | pDKL-142; 2.8 | | Y | | | | | | | |
| TadAC2.9 | pDKL-143; 2.9 | K | | | | W | | | | |
| TadAC2.10 | pDKL-144; 2.10 | | G | | | R | | K | | |
| TadAC2.11 | pDKL-145; 2.11 | | H | | | | | | | |
| TadAC2.12 | pDKL-146; 2.12 | | | | | | | | | C |
| TadAC2.13 | pDKL-147; 2.13 | | Y | | | H | | | | |
| TadAC2.14 | pDKL-148; 2.14 | | | | | | | | | |
| TadAC2.15 | pDKL-149; 2.15 | | | | Q | R | | | | |
| TadAC2.16 | pDKL-150; 2.16 | | | | | H | | | | |
| TadAC2.17 | pDKL-151; 2.17 | | Y | | | | | | H | |
| TadAC2.18 | pDKL-152; 2.18 | | | | | W | | | | |
| TadAC2.19 | pDKL-153; 2.19 | | | | | | | | H | |
| TadAC2.20 | pDKL-154; 2.20 | | | | | | | | | |
| TadAC2.21 | pDKL-155; 2.21 | | Y | | | R | | | | |
| TadAC2.22 | pDKL-156; 2.22 | | | W | | H | | | | |
| TadAC2.23 | pDKL-157; 2.23 | S | | | | Y | | | | |
| TadAC2.24 | pDKL-158; 2.24 | | | | | | | | | |
| | | Residue identity (START Met is | | | | | | | | |
| | | amino acid #1) | | | | | | | | |
| Variant Name | Alternative Variant Names | 119 | 122 | 127 | 143 | 147 | 158 | 159 | 162 | 166 |
| Reference | 1.2 (see Table 6A) | D | H | N | A | R | A | Q | A | T |
| TadAC2.1 | pDKL-135; 2.1 | | | | | | | | | |
| TadAC2.2 | pDKL-136; 2.2 | | | | | | | | | |
| TadAC2.3 | pDKL-137; 2.3 | | R | | | | | | | |
| TadAC2.4 | pDKL-138; 2.4 | | G | | | | | | | |
| TadAC2.5 | pDKL-139; 2.5 | | | | | | | | | |
| TadAC2.6 | pDKL-140; 2.6 | N | | | | | | | | |
| TadAC2.7 | pDKL-141; 2.7 | | | | | | | | | |
| TadAC2.8 | pDKL-142; 2.8 | | | | | | | | | |
| TadAC2.9 | pDKL-143; 2.9 | | T | | | | | | | |
| TadAC2.10 | pDKL-144; 2.10 | | | | | | | | | |
| TadAC2.11 | pDKL-145; 2.11 | | N | | | | | | | |
| TadAC2.12 | pDKL-146; 2.12 | | | | | | | | | |
| TadAC2.13 | pDKL-147; 2.13 | | R | | | | | | | I |
| TadAC2.14 | pDKL-148; 2.14 | | | P | | | | | | |
| TadAC2.15 | pDKL-149; 2.15 | | | | | | | | | |
| TadAC2.16 | pDKL-150; 2.16 | | R | | | | V | | | |
| TadAC2.17 | pDKL-151; 2.17 | | | | | | | | | |
| TadAC2.18 | pDKL-152; 2.18 | | | | | | | | | |
| TadAC2.19 | pDKL-153; 2.19 | | G | | | | | | C | |
| TadAC2.20 | pDKL-154; 2.20 | | | | E | | | | | |
| TadAC2.21 | pDKL-155; 2.21 | | | | | | | | | |
| TadAC2.22 | pDKL-156; 2.22 | | G | | | | V | | | |
| TadAC2.23 | pDKL-157; 2.23 | | | | E | | | S | | |
| TadAC2.24 | pDKL-158; 2.24 | | | I | | | | | Q | |

TABLE 6D
Adenosine deaminase variants. Mutations are indicated with reference to
TadA*8.20.

| AA Positions | 6 | 27 | 49 | 76 | 77 | 82 | 107 | 112 | 114 | 115 | 119 | 122 | 127 | 142 | 143 |
|---|---|---|---|---|---|---|---|---|---|---|---|---|---|---|---|
| TadA*8.20 | F | E | I | Y | D | S | R | G | A | G | D | H | N | A | A |
| S1.154 | F | H | K | Y | D | T | C | H | | M | | | | E | |
| Alterations from Table 6C | Y | | | W | G | | | | C | | N | G | P | | E |
| S2.1 | Y | H | K | W | | | C | H | | M | | | | E | |
| S2.2 | Y | H | K | | G | T | C | H | | M | | | | E | |
| S2.3 | Y | H | K | | | T | C | H | C | M | | | | | |
| S2.4 | Y | H | K | | | T | C | H | | M | N | | | | |
| S2.5 | Y | H | K | | | T | C | H | | M | | G | | E | |
| S2.6 | Y | H | K | | | T | C | H | | M | | | P | E | |
| S2.7 | Y | H | K | | | T | C | H | | M | | | | E | E |
| S2.8 | Y | H | K | | | T | C | H | | M | | | | A | E |
| S2.9 | Y | H | K | W | G | T | C | H | | M | | | | E | |
| S2.10 | Y | H | K | W | | T | C | H | C | M | | | | E | |
| S2.11 | Y | H | K | W | | T | C | H | | M | N | | | E | |
| S2.12 | Y | H | K | W | | T | C | H | | M | | G | | E | |
| S2.13 | Y | H | K | W | | T | C | H | | M | | | P | E | |
| S2.14 | Y | H | K | W | | T | C | H | | M | | | | E | E |
| S2.15 | Y | H | K | W | | T | C | H | | M | | | | A | E |
| S2.16 | Y | H | K | | G | T | C | H | C | M | | | | E | |
| S2.17 | Y | H | K | | G | T | C | H | | M | N | | | E | |
| S2.18 | Y | H | K | | G | T | C | H | | M | | G | | E | |
| S2.19 | Y | H | K | | G | T | C | H | | M | | | P | E | |
| S2.20 | Y | H | K | | G | T | C | H | | M | | | | E | E |
| S2.21 | Y | H | K | | G | T | C | H | | M | | | | A | E |
| S2.22 | Y | H | K | | | T | C | H | C | M | N | | | E | |
| S2.23 | Y | H | K | | | T | C | H | C | M | | G | | E | |
| S2.24 | Y | H | K | | | T | C | H | C | M | | | P | E | |
| S2.25 | Y | H | K | | | T | C | H | | M | N | G | | E | |
| S2.26 | Y | H | K | | | T | C | H | | M | N | | P | E | |
| S2.27 | Y | H | K | | | T | C | H | | M | | G | P | E | |
| S2.28 | Y | H | K | W | G | T | C | H | C | M | | | | E | |
| S2.29 | Y | H | K | W | G | T | C | H | | M | N | | | E | |
| S2.30 | Y | H | K | W | G | T | C | H | | M | | G | | E | |
| S2.31 | Y | H | K | W | G | T | C | H | | M | | | P | E | |
| S2.32 | Y | H | K | W | G | T | C | H | | M | | | | E | E |
| S2.33 | Y | H | K | W | G | T | C | H | | M | | | | E | E |
| S2.34 | Y | H | K | W | | T | C | H | C | M | N | | | E | |
| S2.35 | Y | H | K | W | | T | C | H | C | M | | G | | E | |
| S2.36 | Y | H | K | W | | T | C | H | C | M | | | P | E | |
| S2.37 | Y | H | K | W | | T | C | H | C | M | | | | E | E |
| S2.38 | Y | H | K | W | | T | C | H | C | M | | | | E | E |
| S2.39 | Y | H | K | W | | T | C | H | | M | N | G | | E | |
| S2.40 | Y | H | K | W | | T | C | H | | M | N | | P | E | |
| S2.41 | Y | H | K | M | | T | C | H | | M | | G | P | E | |
| S2.42 | Y | H | K | W | | T | C | H | | M | N | G | | E | |
| S2.43 | Y | H | K | W | | T | C | H | C | M | N | | P | E | |
| S2.44 | Y | H | K | W | | T | C | H | C | M | | G | P | E | |
| S2.45 | Y | H | K | W | G | T | C | H | C | M | N | | | E | |
| S2.46 | Y | H | K | W | G | T | C | H | C | M | | G | | E | |
| S2.47 | Y | H | K | W | G | T | C | H | C | M | | | P | E | |
| S2.48 | Y | H | K | W | G | T | C | H | C | M | | | | E | E |
| S2.49 | Y | H | K | W | G | T | C | H | C | M | | | | A | E |
| S2.50 | Y | H | K | W | G | T | C | H | C | M | N | G | | E | |
| S2.51 | Y | H | K | W | G | T | C | H | C | M | N | | P | E | |
| S2.52 | Y | H | K | W | G | T | C | H | C | M | | G | | E | |
| S2.53 | Y | H | K | W | | T | C | H | C | M | N | G | P | E | E |
| S2.54 | Y | H | K | W | | T | C | H | C | M | N | G | P | A | E |
| S2.55 | Y | H | K | W | G | T | C | H | C | M | N | G | P | E | E |
| S2.56 | Y | H | K | W | G | T | C | H | C | M | N | G | P | A | E |

TABLE 6E
Hybrid constructs. Mutations are indicated with reference to TadA*7.10.

| | TadA amino acid subsitutions | | | | | | | | | | | |
|---|---|---|---|---|---|---|---|---|---|---|---|---|
| | 76 | 82 | 109 | 111 | 119 | 122 | 123 | 147 | 149 | 154 | 166 | 167 |
| TadA*7.10 | I | V | A | T | D | H | Y | Y | F | Q | T | D |
| TadA*8e | | | S | R | N | N | | D | Y | | I | N |
| TadA*8.20 | Y | S | | | | | H | R | | R | | |
| TadA*8.17 | | S | | | | | | | | R | | |
| pNMG-B878 | Y | S | | | | | H | D | | R | | |
| pNMG-B879 | Y | S | | | | | H | R | Y | R | | |
| pNMG-B880 | Y | S | | | | | H | R | | R | I | |
| pNMG-B881 | Y | S | | | | | H | R | | R | | N |
| pNMG-B882 | Y | S | | | | | H | D | Y | R | I | N |
| pNMG-B883 | Y | S | | R | N | | H | R | | R | | |
| pNMG-B884 | Y | S | S | R | N | N | H | R | | R | | |
| pNMG-B885 | Y | S | S | | | | H | R | | R | | |
| pNMG-B886 | Y | S | | R | | | H | R | | R | | |
| pNMG-B887 | Y | S | | | N | | H | R | | R | | |
| pNMG-B888 | Y | S | | | | N | H | R | | R | | |
| pNMG-B889 | Y | S | S | R | | | H | R | | R | | |
| pNMG-B890 | Y | S | | | N | N | H | R | | R | | |
| pNMG-B891 | Y | S | S | R | N | N | H | D | Y | R | I | N |

TABLE 6F
Base editor variants. Mutations are indicated with reference to TadA*8.19/8.20.

| AA positions: | 17 | 27 | 48 | 49 | 76 | 82 | 84 | 118 | 142 | 147 | 149 | 166 | 167 |
|---|---|---|---|---|---|---|---|---|---|---|---|---|---|
| ABE8.19 m/8.20 m | T | E | A | I | Y/I | S | F | M | A | Y | F | T | D |
| 1.1 + 8e(B879) | | H | | | I | | M | | | | Y | | |
| 1.2 + 8e(B879) | | H | | K | I | | | | | | Y | | |
| 1.12 + 8e(B879) | A | H | | M | I | | | L | | | Y | | |
| 1.17 + 8e(B879) | A | | G | | | T | | | E | | Y | | |
| 1.18 + 8e(B879) | | G | | | | | | | | | Y | | |
| 1.19 + 8e(B879) | | G | | N | | | | | | | Y | | |
| 1.1 + 8e(B882) | | H | | | I | | M | | | D | Y | I | N |
| 1.2 + 8e(B882) | | H | | K | I | | | | | D | Y | I | N |
| 1.12 + 8e(B882) | A | H | | M | I | | | L | | D | Y | I | N |
| 1.17 + 8e(B882) | A | | G | | | T | | | E | D | Y | I | N |
| 1.18 + 8e(B882) | | G | | | | | | | | D | Y | I | N |
| 1.19 + 8e(B882) | | G | | N | | | | | | D | Y | I | N |

### Guide Polynucleotides

[0328] A polynucleotide programmable nucleotide binding domain, when in conjunction with a bound guide polynucleotide (e.g., gRNA), can specifically bind to a target polynucleotide sequence (i.e., via complementary base pairing between bases of the bound guide nucleic acid and bases of the target polynucleotide sequence) and thereby localize the base editor to the target nucleic acid sequence desired to be edited. In some embodiments, the target polynucleotide sequence comprises single-stranded DNA or double-stranded DNA. In some embodiments, the target polynucleotide sequence comprises RNA. In some embodiments, the target polynucleotide sequence comprises a DNA-RNA hybrid.

[0329] In an embodiment, a guide polynucleotide described herein can be RNA or DNA. In one embodiment, the guide polynucleotide is a gRNA.

[0330] In some embodiments, the guide polynucleotide is at least one single guide RNA (“sgRNA” or “gRNA”). In some embodiments, a guide polynucleotide comprises two or more individual polynucleotides, which can interact with one another via for example complementary base pairing (e.g., a dual guide polynucleotide, dual gRNA). For example, a guide polynucleotide can comprise a CRISPR RNA (crRNA) and a trans-activating CRISPR RNA (tracrRNA) or can comprise one or more trans-activating CRISPR RNA (tracrRNA).

[0331] A guide polynucleotide may include natural or non-natural (or unnatural) nucleotides (e.g., peptide nucleic acid or nucleotide analogs). In some cases, the targeting region of a guide nucleic acid sequence (e.g., a spacer) can be at least 15, 16, 17, 18, 19, 20, 21, 22, 23, 24, 25, 26, 27, 28, 29, or 30 nucleotides in length.

[0332] In some embodiments, the methods described herein can utilize an engineered Cas protein. A guide RNA (gRNA) is a short synthetic RNA composed of a scaffold sequence necessary for Cas-binding and a user-defined ˜20 nucleotide spacer that defines the genomic target to be modified. Exemplary gRNA scaffold sequences are provided in the sequence listing as SEQ ID NOs: 317-327 and 669. Thus, a skilled artisan can change the genomic target of the Cas protein specificity is partially determined by how specific the gRNA targeting sequence is for the genomic target compared to the rest of the genome. In embodiments, the spacer is about 10, 11, 12, 13, 14, 15, 16, 17, 18, 19, 20, 22, 23, 24, 25, or more nucleotides in length. The spacer of a gRNA can be or can be about 19, 20, or 21 nucleotides in length.

[0333] A gRNA or a guide polynucleotide can target any exon or intron of a gene target. In some embodiments, a composition comprises multiple gRNAs that all target the same exon or multiple gRNAs that target different exons. An exon and/or an intron of a gene can be targeted. A gRNA or a guide polynucleotide can target a nucleic acid sequence of about 20 nucleotides or less than about 20 nucleotides (e.g., at least about 5, 10, 15, 16, 17, 18, 19, 20, 21, 22, 23, 24, 25, 30 nucleotides), or anywhere between about 1-100 nucleotides (e.g., 5, 10, 15, 16, 17, 18, 19, 20, 21, 22, 23, 24, 25, 30, 40, 50, 60, 70, 80, 90, 100). A target nucleic acid sequence can be or can be about 20 bases immediately 5′ of the first nucleotide of the PAM. A gRNA can target a nucleic acid sequence. A target nucleic acid can be at least or at least about 1-10, 1-20, 1-30, 1-40, 1-50, 1-60, 1-70, 1-80, 1-90, or 1-100 nucleotides.

[0334] The guide polynucleotides can comprise standard ribonucleotides, modified ribonucleotides (e.g., pseudouridine), ribonucleotide isomers, and/or ribonucleotide analogs.

[0335] In some embodiments, a base editor system may comprise multiple guide polynucleotides, e.g., gRNAs. For example, the gRNAs may target to one or more target loci (e.g., at least 1 gRNA, at least 2 gRNA, at least 5 gRNA, at least 10 gRNA, at least 20 gRNA, at least 30 g RNA, at least 50 gRNA) comprised in a base editor system. The multiple gRNA sequences can be tandemly arranged and may be separated by a direct repeat.

### Modified Polynucleotides

[0336] To enhance expression, stability, and/or genomic/base editing efficiency, and/or reduce possible toxicity, the base editor-coding sequence (e.g., mRNA) and/or the guide polynucleotide (e.g., gRNA) can be modified to include one or more modified nucleotides and/or chemical modifications, e.g. using pseudo-uridine, 5-Methyl-cytosine, 2′-O-methyl-3′-phosphonoacetate, 2′-O-methyl thioPACE (MSP), 2′-O-methyl-PACE (MP), 2′-fluoro RNA (2′-F-RNA), =constrained ethyl (S-cEt), 2′-O-methyl (‘M’), 2′-O-methyl-3′-phosphorothioate (‘MS’), 2′-O-methyl-3′-thiophosphonoacetate (‘MSP’), 5-methoxyuridine, phosphorothioate, and N1-Methylpseudouridine. Chemically protected gRNAs can enhance stability and editing efficiency in vivo and ex vivo. Methods for using chemically modified mRNAs and guide RNAs are known in the art and described, for example, by Jiang et al., Chemical modifications of adenine base editor mRNA and guide RNA expand its application scope. Nat Commun 11, 1979 (2020). doi.org/10.1038/s41467-020-15892-8, Callum et al., N1-Methylpseudouridine substitution enhances the performance of synthetic mRNA switches in cells, Nucleic Acids Research, Volume 48, Issue 6, 6 Apr. 2020, Page e35, and Andries et al., Journal of Controlled Release, Volume 217, 10 Nov. 2015, Pages 337-344, each of which is incorporated herein by reference in its entirety.

[0337] In some embodiments, the guide polynucleotide comprises one or more modified nucleotides at the 5′ end and/or the 3′ end of the guide. In some embodiments, the guide polynucleotide comprises two, three, four or more modified nucleosides at the 5′ end and/or the 3′ end of the guide. In some embodiments, the guide polynucleotide comprises two, three, four or more modified nucleosides at the 5′ end and/or the 3′ end of the guide.

[0338] In some embodiments, the guide comprises at least about 50%-75% modified nucleotides. In some embodiments, the guide comprises at least about 85% or more modified nucleotides. In some embodiments, at least about 1-5 nucleotides at the 5′ end of the gRNA are modified and at least about 1-5 nucleotides at the 3′ end of the gRNA are modified. In some embodiments, at least about 3-5 contiguous nucleotides at each of the 5′ and 3′ termini of the gRNA are modified. In some embodiments, at least about 20% of the nucleotides present in a direct repeat or anti-direct repeat are modified. In some embodiments, at least about 50% of the nucleotides present in a direct repeat or anti-direct repeat are modified. In some embodiments, at least about 50-75% of the nucleotides present in a direct repeat or anti-direct repeat are modified. In some embodiments, at least about 100 of the nucleotides present in a direct repeat or anti-direct repeat are modified. In some embodiments, at least about 20% or more of the nucleotides present in a hairpin present in the gRNA scaffold are modified. In some embodiments, at least about 50% or more of the nucleotides present in a hairpin present in the gRNA scaffold are modified. In some embodiments, the guide comprises a variable length spacer. In some embodiments, the guide comprises a 20-40 nucleotide spacer. In some embodiments, the guide comprises a spacer comprising at least about 20-25 nucleotides or at least about 30-35 nucleotides. In some embodiments, the spacer comprises modified nucleotides. In some embodiments, the guide comprises two or more of the following:
[0339] at least about 1-5 nucleotides at the 5′ end of the gRNA are modified and at least about 1-5 nucleotides at the 3′ end of the gRNA are modified;
[0340] at least about 20% of the nucleotides present in a direct repeat or anti-direct repeat are modified;
[0341] at least about 50-75% of the nucleotides present in a direct repeat or anti-direct repeat are modified;
[0342] at least about 20% or more of the nucleotides present in a hairpin present in the gRNA scaffold are modified;
[0343] a variable length spacer; and
[0344] a spacer comprising modified nucleotides.

[0345] In embodiments, the gRNA contains numerous modified nucleotides and/or chemical modifications (“heavy mods”). Such heavy mods can increase base editing ˜2 fold in vivo or in vitro. In embodiments, the gRNA comprises 2′-O-methyl or phosphorothioate modifications. In an embodiment, the gRNA comprises 2′-O-methyl and phosphorothioate modifications. In an embodiment, the modifications increase base editing by at least about 2 fold.

[0346] A guide polynucleotide can comprise one or more modifications to provide a nucleic acid with a new or enhanced feature. A guide polynucleotide can comprise a nucleic acid affinity tag. A guide polynucleotide can comprise synthetic nucleotide, synthetic nucleotide analog, nucleotide derivatives, and/or modified nucleotides.

[0347] A gRNA or a guide polynucleotide can also be modified by 5′ adenylate, 5′ guanosine-triphosphate cap, 5′ N7-Methylguanosine-triphosphate cap, 5′ triphosphate cap, 3′ phosphate, 3′ thiophosphate, 5′ phosphate, 5′ thiophosphate, Cis-Syn thymidine dimer, trimers, C12 spacer, C3 spacer, C6 spacer, dSpacer, PC spacer, rSpacer, Spacer 18, Spacer 9, 3′-3′ modifications, 2′-O-methyl thioPACE (MSP), 2′-O-methyl-PACE (MP), and constrained ethyl (S-cEt), 5′-5′ modifications, abasic, acridine, azobenzene, biotin, biotin BB, biotin TEG, cholesteryl TEG, desthiobiotin TEG, DNP TEG, DNP-X, DOTA, dT-Biotin, dual biotin, PC biotin, psoralen C2, psoralen C6, TINA, 3′ DABCYL, black hole quencher 1, black hole quencher 2, DABCYL SE, dT-DABCYL, IRDye QC-1, QSY-21, QSY-35, QSY-7, QSY-9, carboxyl linker, thiol linkers, 2′-deoxyribonucleoside analog purine, 2′-deoxyribonucleoside analog pyrimidine, ribonucleoside analog, 2′-O-methyl ribonucleoside analog, sugar modified analogs, wobble/universal bases, fluorescent dye label, 2′-fluoro RNA, 2′-O-methyl RNA, methylphosphonate, phosphodiester DNA, phosphodiester RNA, phosphothioate DNA, phosphorothioate RNA, UNA, pseudouridine-5′-triphosphate, 5′-methylcytidine-5′-triphosphate, or any combination thereof.

[0348] In some cases, a phosphorothioate enhanced RNA gRNA can inhibit RNase A, RNase T1, calf serum nucleases, or any combinations thereof. These properties can allow the use of PS-RNA gRNAs to be used in applications where exposure to nucleases is of high probability in vivo or in vitro. For example, phosphorothioate (PS) bonds can be introduced between the last 3-5 nucleotides at the 5′- or 3′-end of a gRNA which can inhibit exonuclease degradation. In some cases, phosphorothioate bonds can be added throughout an entire gRNA to reduce attack by endonucleases.

### Fusion Proteins or Complexes Comprising a Nuclear Localization Sequence (NLS)

[0349] In some embodiments, the fusion proteins or complexes provided herein further comprise one or more (e.g., 2, 3, 4, 5) nuclear targeting sequences, for example a nuclear localization sequence (NLS). In one embodiment, a bipartite NLS is used. In some embodiments, a NLS comprises an amino acid sequence that facilitates the importation of a protein, that comprises an NLS, into the cell nucleus (e.g., by nuclear transport). In some embodiments, the NLS is fused to the N-terminus or the C-terminus of the fusion protein. In some embodiments, the NLS is fused to the C-terminus or N-terminus of an nCas9 domain or a dCas9 domain. In some embodiments, the NLS is fused to the N-terminus or C-terminus of the Cas12 domain. In some embodiments, the NLS is fused to the N-terminus or C-terminus of the cytidine or adenosine deaminase. In some embodiments, the NLS is fused to the fusion protein via one or more linkers. In some embodiments, the NLS is fused to the fusion protein without a linker. In some embodiments, the NLS comprises an amino acid sequence of any one of the NLS sequences provided or referenced herein. Additional nuclear localization sequences are known in the art and would be apparent to the skilled artisan. For example, NLS sequences are described in Plank et al., PCT/EP2000/011690, the contents of which are incorporated herein by reference for their disclosure of exemplary nuclear localization sequences.

[0350] In some embodiments, the NLS is present in a linker or the NLS is flanked by linkers, for example described herein. A bipartite NLS comprises two basic amino acid clusters, which are separated by a relatively short spacer sequence (hence bipartite-2 parts, while monopartite NLSs are not). The NLS of nucleoplasmin, KR [PAATKKAGQA] KKKK (SEQ ID NO: 191), is the prototype of the ubiquitous bipartite signal: two clusters of basic amino acids, separated by a spacer of about 10 amino acids. The sequence of an exemplary bipartite NLS follows:

(SEQ ID NO: 328)
PKKKRKVEGADKRTADGSEFESPKKKRKV.

[0351] In some embodiments, any of the fusion proteins or complexes provided herein comprise an NLS comprising the amino acid sequence EGADKRTADGSEFESPKKKRKV (amino acids 8 to 29 of SEQ ID NO 328). In some embodiments, any of the adenosine base editors provided herein, for example ABE Variant A, ABE Variant B, ABE Variant C, ABE Variant D, ABE Variant E, ABE Variant F, ABE Variant G, ABE Variant H, ABE Variant I, ABE Variant J, ABE Variant K, or ABE Variant D comprise an NLS comprising the amino acid sequence EGADKRTADGSEFESPKKKRKV (amino acids 8 to 29 of SEQ ID NO: 328). In some embodiments, the NLS is at a C-terminal portion of the adenosine base editor. In some embodiments, the NLS is at the C-terminus of the adenosine base editor.

### Additional Domains

[0352] A base editor described herein can include any domain which helps to facilitate the nucleobase editing, modification or altering of a nucleobase of a polynucleotide. In some embodiments, a base editor comprises a polynucleotide programmable nucleotide binding domain (e.g., Cas9), a nucleobase editing domain (e.g., deaminase domain), and one or more additional domains. In some embodiments, the additional domain can facilitate enzymatic or catalytic functions of the base editor, binding functions of the base editor, or be inhibitors of cellular machinery (e.g., enzymes) that could interfere with the desired base editing result. In some embodiments, a base editor comprises a nuclease, a nickase, a recombinase, a deaminase, a methyltransferase, a methylase, an acetylase, an acetyltransferase, a transcriptional activator, or a transcriptional repressor domain.

[0353] In some embodiments, a base editor comprises an uracil glycosylase inhibitor (UGI) domain. In some cases, a base editor is expressed in a cell in trans with a UGI polypeptide. In some embodiments, cellular DNA repair response to the presence of U: G heteroduplex DNA can be responsible for a reduction in nucleobase editing efficiency in cells. In such embodiments, uracil DNA glycosylase (UDG) can catalyze removal of U from DNA in cells, which can initiate base excision repair (BER), mostly resulting in reversion of the U: G pair to a C: G pair. In such embodiments, BER can be inhibited in base editors comprising one or more domains that bind the single strand, block the edited base, inhibit UGI, inhibit BER, protect the edited base, and/or promote repairing of the non-edited strand. Thus, this disclosure contemplates a base editor fusion protein or complex comprising a UGI domain and/or a uracil stabilizing protein (USP) domain.

### Base Editor System

[0354] Provided herein are systems, compositions, and methods for editing a nucleobase using a base editor system. In some embodiments, the base editor system comprises (1) a base editor (BE) comprising a polynucleotide programmable nucleotide binding domain and a nucleobase editing domain (e.g., a deaminase domain) for editing the nucleobase; and (2) a guide polynucleotide (e.g., guide RNA) in conjunction with the polynucleotide programmable nucleotide binding domain. In some embodiments, the base editor system is a cytidine base editor (CBE) or an adenosine base editor (ABE). In some embodiments, the polynucleotide programmable nucleotide binding domain is a polynucleotide programmable DNA or RNA binding domain. In some embodiments, the nucleobase editing domain is a deaminase domain. In some embodiments, a deaminase domain can be a cytidine deaminase or an cytosine deaminase. In some embodiments, a deaminase domain can be an adenine deaminase or an adenosine deaminase. In some embodiments, the adenosine base editor can deaminate adenine in DNA. In some embodiments, the base editor is capable of deaminating a cytidine in DNA.

[0355] Use of the base editor system provided herein comprises the steps of: (a) contacting a target nucleotide sequence of a polynucleotide (e.g., double- or single stranded DNA or RNA) of a subject with a base editor system comprising a nucleobase editor (e.g., an adenosine base editor or a cytidine base editor) and a guide polynucleotide (e.g., gRNA), wherein the target nucleotide sequence comprises a targeted nucleobase pair; (b) inducing strand separation of said target region; (c) converting a first nucleobase of said target nucleobase pair in a single strand of the target region to a second nucleobase; and (d) cutting no more than one strand of said target region, where a third nucleobase complementary to the first nucleobase base is replaced by a fourth nucleobase complementary to the second nucleobase. It should be appreciated that in some embodiments, step (b) is omitted. In some embodiments, said targeted nucleobase pair is a plurality of nucleobase pairs in one or more genes. In some embodiments, the base editor system provided herein is capable of multiplex editing of a plurality of nucleobase pairs in one or more genes. In some embodiments, the plurality of nucleobase pairs is located in the same gene. In some embodiments, the plurality of nucleobase pairs is located in one or more genes, wherein at least one gene is located in a different locus.

[0356] The components of a base editor system (e.g., a deaminase domain, a guide RNA, and/or a polynucleotide programmable nucleotide binding domain) may be associated with each other covalently or non-covalently. For example, in some embodiments, the deaminase domain can be targeted to a target nucleotide sequence by a polynucleotide programmable nucleotide binding domain, optionally where the polynucleotide programmable nucleotide binding domain is complexed with a polynucleotide (e.g., a guide RNA). In some embodiments, a polynucleotide programmable nucleotide binding domain can be fused or linked to a deaminase domain. In some embodiments, a polynucleotide programmable nucleotide binding domain can target a deaminase domain to a target nucleotide sequence by non-covalently interacting with or associating with the deaminase domain. For example, in some embodiments, the nucleobase editing component (e.g., the deaminase component) comprises an additional heterologous portion or domain that is capable of interacting with, associating with, or capable of forming a complex with a corresponding heterologous portion, antigen, or domain that is part of a polynucleotide programmable nucleotide binding domain and/or a guide polynucleotide (e.g., a guide RNA) complexed therewith. In some embodiments, the polynucleotide programmable nucleotide binding domain, and/or a guide polynucleotide (e.g., a guide RNA) complexed therewith, comprises an additional heterologous portion or domain that is capable of interacting with, associating with, or capable of forming a complex with a corresponding heterologous portion, antigen, or domain that is part of a nucleobase editing domain (e.g., the deaminase component). In some embodiments, the additional heterologous portion may be capable of binding to, interacting with, associating with, or forming a complex with a polypeptide. In some embodiments, the additional heterologous portion may be capable of binding to, interacting with, associating with, or forming a complex with a polynucleotide. In some embodiments, the additional heterologous portion may be capable of binding to a guide polynucleotide. In some embodiments, the additional heterologous portion may be capable of binding to a polypeptide linker. In some embodiments, the additional heterologous portion is capable of binding to a polynucleotide linker. An additional heterologous portion may be a protein domain. In some embodiments, an additional heterologous portion comprises a polypeptide, such as a 22 amino acid RNA-binding domain of the lambda bacteriophage antiterminator protein N (N22p), a 2G12 IgG homodimer domain, an ABI, an antibody (e.g. an antibody that binds a component of the base editor system or a heterologous portion thereof) or fragment thereof (e.g. heavy chain domain 2 (CH2) of IgM (MHD2) or IgE (EHD2), an immunoglobulin Fc region, a heavy chain domain 3 (CH3) of IgG or IgA, a heavy chain domain 4 (CH4) of IgM or IgE, an Fab, an Fab2, miniantibodies, and/or ZIP antibodies), a barnase-barstar dimer domain, a Bcl-xL domain, a Calcineurin A (CAN) domain, a Cardiac phospholamban transmembrane pentamer domain, a collagen domain, a Com RNA binding protein domain (e.g. SfMu Com coat protein domain, and SfMu Com binding protein domain), a Cyclophilin-Fas fusion protein (CyP-Fas) domain, a Fab domain, an Fc domain, a fibritin foldon domain, an FK506 binding protein (FKBP) domain, an FKBP binding domain (FRB) domain of mTOR, a foldon domain, a fragment X domain, a GAI domain, a GID1 domain, a Glycophorin A transmembrane domain, a GyrB domain, a Halo tag, an HIV Gp41 trimerisation domain, an HPV45 oncoprotein E7 C-terminal dimer domain, a hydrophobic polypeptide, a K Homology (KH) domain, a Ku protein domain (e.g., a Ku heterodimer), a leucine zipper, a LOV domain, a mitochondrial antiviral-signaling protein CARD filament domain, an MS2 coat protein domain (MCP), a non-natural RNA aptamer ligand that binds a corresponding RNA motif/aptamer, a parathyroid hormone dimerization domain, a PP7 coat protein (PCP) domain, a PSD95-Dlgl-zo-1 (PDZ) domain, a PYL domain, a SNAP tag, a SpyCatcher moiety, a SpyTag moiety, a streptavidin domain, a streptavidin-binding protein domain, a streptavidin binding protein (SBP) domain, a telomerase Sm7 protein domain (e.g. Sm7 homoheptamer or a monomeric Sm-like protein), and/or fragments thereof. In embodiments, an additional heterologous portion comprises a polynucleotide (e.g., an RNA motif), such as an MS2 phage operator stem-loop (e.g., an MS2, an MS2 C-5 mutant, or an MS2 F-5 mutant), a non-natural RNA motif, a PP7 operator stem-loop, an SfMu phate Com stem-loop, a steril alpha motif, a telomerase Ku binding motif, a telomerase Sm7 binding motif, and/or fragments thereof. Non-limiting examples of additional heterologous portions include polypeptides with at least about 85% sequence identity to any one or more of SEQ ID NOs: 380, 382, 384, 386-388, or fragments thereof. Non-limiting examples of additional heterologous portions include polynucleotides with at least about 85% sequence identity to any one or more of SEQ ID NOs: 379, 381, 383, 385, or fragments thereof.

[0357] In some instances, components of the base editing system are associated with one another through the interaction of leucine zipper domains (e.g., SEQ ID NOs: 387 and 388). In some cases, components of the base editing system are associated with one another through polypeptide domains (e.g., FokI domains) that associate to form protein complexes containing about, at least about, or no more than about 1, 2 (i.e., dimerize), 3, 4, 5, 6, 7, 8, 9, 10 polypeptide domain units, optionally the polypeptide domains may include alterations that reduce or eliminate an activity thereof.

[0358] In some instances, components of the base editing system are associated with one another through the interaction of multimeric antibodies or fragments thereof (e.g., IgG, IgD, IgA, IgM, IgE, a heavy chain domain 2 (CH2) of IgM (MHD2) or IgE (EHD2), an immunoglobulin Fc region, a heavy chain domain 3 (CH3) of IgG or IgA, a heavy chain domain 4 (CH4) of IgM or IgE, an Fab, and an Fab2). In some instances, the antibodies are dimeric, trimeric, or tetrameric. In embodiments, the dimeric antibodies bind a polypeptide or polynucleotide component of the base editing system.

[0359] In some cases, components of the base editing system are associated with one another through the interaction of a polynucleotide-binding protein domain(s) with a polynucleotide(s). In some instances, components of the base editing system are associated with one another through the interaction of one or more polynucleotide-binding protein domains with polynucleotides that are self-complementary and/or complementary to one another so that complementary binding of the polynucleotides to one another brings into association their respective bound polynucleotide-binding protein domain(s).

[0360] In some instances, components of the base editing system are associated with one another through the interaction of a polypeptide domain(s) with a small molecule(s) (e.g., chemical inducers of dimerization (CIDs), also known as “dimerizers”). Non-limiting examples of CIDs include those disclosed in Amara, et al., “A versatile synthetic dimerizer for the regulation of protein-protein interactions,” PNAS, 94:10618-10623 (1997); and Voß, et al. “Chemically induced dimerization: reversible and spatiotemporal control of protein function in cells,” Current Opinion in Chemical Biology, 28:194-201 (2015), the disclosures of each of which are incorporated herein by reference in their entireties for all purposes. In some embodiments, the base editor inhibits base excision repair (BER) of the edited strand. In some embodiments, the base editor protects or binds the non-edited strand. In some embodiments, the base editor comprises UGI activity or USP activity. In some embodiments, the base editor comprises a catalytically inactive inosine-specific nuclease.

[0361] The base editors of the present disclosure can comprise any domain, feature or amino acid sequence which facilitates the editing of a target polynucleotide sequence. For example, in some embodiments, the base editor comprises a nuclear localization sequence (NLS). In some embodiments, an NLS of the base editor is localized between a deaminase domain and a polynucleotide programmable nucleotide binding domain. In some embodiments, an NLS of the base editor is localized C-terminal to a polynucleotide programmable nucleotide binding domain.

[0362] Protein domains included in the fusion protein can be a heterologous functional domain. Non-limiting examples of protein domains which can be included in the fusion protein include a deaminase domain (e.g., cytidine deaminase and/or adenosine deaminase), a uracil glycosylase inhibitor (UGI) domain, epitope tags, and reporter gene sequences.

In some embodiments, the adenosine base editor (ABE) can deaminate adenine in DNA. In some embodiments, ABE is generated by replacing APOBEC1 component of BE3 with natural or engineered E. coli TadA, human ADAR2, mouse ADA, or human ADAT2. In some embodiments, ABE comprises an evolved TadA variant. In some embodiments, the base editor is ABE8.1, which comprises or consists essentially of the following sequence or a fragment thereof having adenosine deaminase activity: SEQ ID NO: 331. Other ABE8 sequences are provided in the attached sequence listing (SEQ ID NOs: 332-354).

[0363] In some embodiments, the base editor includes an adenosine deaminase variant comprising an amino acid sequence, which contains alterations relative to an ABE 7*10 reference sequence, as described herein. The term “monomer” as used in Table 7 refers to a monomeric form of TadA*7.10 comprising the alterations described. The term “heterodimer” as used in Table 7 refers to the specified wild-type E. coli TadA adenosine deaminase fused to a TadA*7.10 comprising the alterations as described.

TABLE 7
Adenosine Deaminase Base Editor Variants

| | Adenosine | |
|---|---|---|
| ABE | Deaminase | Adenosine Deaminase Description |
| ABE-605m | MSP605 | monomer_TadA*7.10 + V82G + Y147T + Q154S |
| ABE-680m | MSP680 | monomer_TadA*7.10 + I76Y + V82G + Y147T + Q154S |
| ABE-823m | MSP823 | monomer_TadA*7.10 + L36H + V82G + Y147T + Q154S + |
| | | N157K |
| ABE-824m | MSP824 | monomer_TadA*7.10 + V82G + Y147D + F149Y + Q154S + |
| | | D167N |
| ABE-825m | MSP825 | monomer_TadA*7.10 + L36H + V82G + Y147D + F149Y + |
| | | Q154S + N157K + D167N |
| ABE-827m | MSP827 | monomer_TadA*7.10 + L36H + I76Y + V82G + Y147T + Q154S + |
| | | N157K |
| ABE-828m | MSP828 | monomer_TadA*7.10 + I76Y + V82G + Y147D + F149Y + Q154S + |
| | | D167N |
| ABE-829m | MSP829 | monomer_TadA*7.10 + L36H + I76Y + V82G + Y147D + F149Y + |
| | | Q154S + N157K + D167N |
| ABE-605d | MSP605 | heterodimer_(WT) + (TadA*7.10 + V82G + Y147T + Q154S) |
| ABE-680d | MSP680 | heterodimer_(WT) + (TadA*7.10 + I76Y + V82G + Y147T + |
| | | Q154S) |
| ABE-823d | MSP823 | heterodimer_(WT) + (TadA*7.10 + L36H + V82G + Y147T + |
| | | Q154S + N157K) |
| ABE-824d | MSP824 | heterodimer_(WT) + (TadA*7.10 + V82G + Y147D + F149Y + |
| | | Q154S + D167N) |
| ABE-825d | MSP825 | heterodimer_(WT) + (TadA*7.10 + L36H + V82G + Y147D + |
| | | F149Y + Q154S + N157K + D167N) |
| ABE-827d | MSP827 | heterodimer_(WT) + (TadA*7.10 + L36H + I76Y + V82G + Y147T + |
| | | Q154S + N157K) |
| ABE-828d | MSP828 | heterodimer_(WT) + (TadA*7.10 + I76Y + V82G + Y147D + |
| | | F149Y + Q154S + D167N) |
| ABE-829d | MSP829 | heterodimer_(WT) + (TadA*7.10 + L36H + I76Y + V82G + Y147D + |
| | | F149Y + Q154S + N157K + D167N) |

[0364] In some embodiments, the base editor comprises a domain comprising all or a portion (e.g., a functional portion) of a uracil glycosylase inhibitor (UGI) or a uracil stabilizing protein (USP) domain.

### Linkers

[0365] In certain embodiments, linkers may be used to link any of the peptides or peptide domains of the disclosure. The linker may be as simple as a covalent bond, or it may be a polymeric linker many atoms in length. In certain embodiments, the linker is a polypeptide or based on amino acids. In other embodiments, the linker is not peptide-like. In certain embodiments, the linker is a covalent bond (e.g., a carbon-carbon bond, disulfide bond, carbon-heteroatom bond, etc.).

[0366] In some embodiments, any of the fusion proteins provided herein, comprise a cytidine or adenosine deaminase and a Cas9 domain that are fused to each other via a linker. Various linker lengths and flexibilities between the cytidine or adenosine deaminase and the Cas9 domain can be employed (e.g., ranging from very flexible linkers of the form (GGGS)ₙ (SEQ ID NO: 246), (GGGGS)ₙ (SEQ ID NO: 247), and (G)ₙ to more rigid linkers of the form (EAAAK)ₙ (SEQ ID NO: 248), (SGGS)ₙ (SEQ ID NO: 355), SGSETPGTSESATPES (SEQ ID NO: 249) (see, e.g., Guilinger J P, et al. Fusion of catalytically inactive Cas9 to FokI nuclease improves the specificity of genome modification. Nat. Biotechnol. 2014; 32 (6): 577-82; the entire contents are incorporated herein by reference) and (XP)n) in order to achieve the optimal length for activity for the cytidine or adenosine deaminase nucleobase editor. In some embodiments, n is 1, 2, 3, 4, 5, 6, 7, 8, 9, 10, 11, 12, 13, 14, or 15. In some embodiments, the linker comprises a (GGS)n motif, wherein n is 1, 3, or 7. In some embodiments, cytidine deaminase or adenosine deaminase and the Cas9 domain of any of the fusion proteins provided herein are fused via a linker comprising the amino acid sequence SGSETPGTSESATPES (SEQ ID NO: 249), which can also be referred to as the XTEN linker.

[0367] In some embodiments, the domains of the base editor are fused via a linker that comprises the amino acid sequence of:

(SEQ ID NO: 356)
SGGSSGSETPGTSESATPESSGGS,
(SEQ ID NO: 357)
SGGSSGGSSGSETPGTSESATPESSGGSSGGS,
or
(SEQ ID NO: 358)
GGSGGSPGSPAGSPTSTEEGTSESATPESGPGTSTEPSEGSAPGSPAG
SPTSTEEGTSTEPSEGSAPGTSTEPSEGSAPGTSESATPESGPGSEPA
TSGGSGGS.

[0368] In some embodiments, domains of the base editor are fused via a linker comprising the amino acid sequence SGSETPGTSESATPES (SEQ ID NO: 249), which may also be referred to as the XTEN linker. In some embodiments, a linker comprises the amino acid sequence SGGS (SEQ ID NO: 355). In some embodiments, the linker is 24 amino acids in length. In some embodiments, the linker comprises the amino acid sequence SGGSSGGSSGSETPGTSESATPES (SEQ ID NO: 359). In some embodiments, the linker is 40 amino acids in length. In some embodiments, the linker comprises the amino acid sequence: SGGSSGGSSGSETPGTSESATPESSGGSSGGSSGGSSGGS (SEQ ID NO: 360). In some embodiments, the linker is 64 amino acids in length. In some embodiments, the linker comprises the amino acid sequence: SGGSSGGSSGSETPGTSESATPESSGGSSGGSSGGSSGGSSGSETPGTSESATPESSGGSSGGS (SEQ ID NO: 361). In some embodiments, the linker is 92 amino acids in length. In some embodiments, the linker comprises the amino acid sequence:

(SEQ ID NO: 362)
PGSPAGSPTSTEEGTSESATPESGPGTSTEPSEGSAPGSPAGSPTSTE
EGTSTEPSEGSAPGTSTEPSEGSAPGTSESATPESGPGSEPATS.

In some embodiments, a linker comprises a plurality of proline residues and is 5-21, 5-14, 5-9, 5-7 amino acids in length, e.g., PAPAP (SEQ ID NO: 363), PAPAPA (SEQ ID NO: 364), PAPAPAP (SEQ ID NO: 365), PAPAPAPA (SEQ ID NO: 366), P (AP) 4 (SEQ ID NO: 367), P (AP) 7 (SEQ ID NO: 368), P (AP) 10 (SEQ ID NO: 369) (see, e.g., Tan J, Zhang F, Karcher D, Bock R. Engineering of high-precision base editors for site-specific single nucleotide replacement. Nat Commun. 2019 Jan. 25; 10 (1): 439; the entire contents are incorporated herein by reference). Such proline-rich linkers are also termed “rigid” linkers.
Nucleic Acid Programmable DNA Binding Proteins with Guide RNAs

[0369] Provided herein are compositions and methods for base editing in cells. Further provided herein are compositions comprising a guide polynucleotide sequence, e.g., a guide RNA sequence, or a combination of 2, 3, 4, 5, 6, 7, 8, 9, 10, 11, 12, 13, 14, 15, 16, 17, 18, 19, 20, or more guide RNAs as provided herein. In some embodiments, a composition for base editing as provided herein further comprises a polynucleotide that encodes a base editor, e.g., a C-base editor or an A-base editor. For example, a composition for base editing may comprise a mRNA sequence encoding a BE, a BE4, an ABE, and a combination of one or more guide RNAs as provided. A composition for base editing may comprise a base editor polypeptide and a combination of one or more of any guide RNAs provided herein. Such a composition may be used to effect base editing in a cell through different delivery approaches, for example, electroporation, nucleofection, viral transduction or transfection. In some embodiments, the composition for base editing comprises an mRNA sequence that encodes a base editor and a combination of one or more guide RNA sequences provided herein for electroporation.

[0370] Some aspects of this disclosure provide systems comprising any of the fusion proteins or complexes provided herein, and a guide RNA bound to a nucleic acid programmable DNA binding protein (napDNAbp) domain (e.g., a Cas9 (e.g., a dCas9, a nuclease active Cas9, or a Cas9 nickase) or Cas12) of the fusion protein or complex. These complexes are also termed ribonucleoproteins (RNPs). In some embodiments, the guide nucleic acid (e.g., guide RNA) is from 15-100 nucleotides long and comprises a sequence of at least 10 contiguous nucleotides that is complementary to a target sequence. In some embodiments, the target sequence is a DNA sequence. In some embodiments, the target sequence is an RNA sequence. In some embodiments, the target sequence is a sequence in the genome of a bacteria, yeast, fungi, insect, plant, or animal. In some embodiments, the target sequence is a sequence in the genome of a human. In some embodiments, the 3′ end of the target sequence is immediately adjacent to a canonical PAM sequence (NGG). In some embodiments, the 3′ end of the target sequence is immediately adjacent to a non-canonical PAM sequence (e.g., a sequence listed in Table 3 or 5′-NAA-3′). In some embodiments, the guide nucleic acid (e.g., guide RNA) is complementary to a sequence in a gene of interest (e.g., a gene associated with a disease or disorder).

[0371] Some aspects of this disclosure provide methods of using the fusion proteins, or complexes provided herein. For example, some aspects of this disclosure provide methods comprising contacting a DNA molecule with any of the fusion proteins or complexes provided herein, and with at least one guide RNA, wherein the guide RNA is about 15-100 nucleotides long and comprises a sequence of at least 10 contiguous nucleotides that is complementary to a target sequence.

[0372] The domains of the base editor disclosed herein can be arranged in any order.

[0373] A defined target region can be a deamination window. A deamination window can be the defined region in which a base editor acts upon and deaminates a target nucleotide. In some embodiments, the deamination window is within a 2, 3, 4, 5, 6, 7, 8, 9, or 10 base regions. In some embodiments, the deamination window is 5, 6, 7, 8, 9, 10, 11, 12, 13, 14, 15, 16, 17, 18, 19, 20, 21, 22, 23, 24, or 25 bases upstream of the PAM.

[0374] The base editors of the present disclosure can comprise any domain, feature or amino acid sequence which facilitates the editing of a target polynucleotide sequence.

### Methods of Using Fusion Proteins or Complexes Comprising a Cytidine or Adenosine Deaminase and a Cas9 Domain

[0375] Some aspects of this disclosure provide methods of using the fusion proteins, or complexes provided herein. For example, some aspects of this disclosure provide methods comprising contacting a DNA molecule with any of the fusion proteins or complexes provided herein, and with at least one guide RNA described herein.

[0376] In some embodiments, a fusion protein or complex of the disclosure is used for editing a target gene of interest. In particular, a cytidine deaminase or adenosine deaminase nucleobase editor described herein is capable of making multiple mutations within a target sequence. These mutations may affect the function of the target. For example, when a cytidine deaminase or adenosine deaminase nucleobase editor is used to target a regulatory region the function of the regulatory region is altered and the expression of the downstream protein is reduced or eliminated.

### Base Editor Efficiency

[0377] In some embodiments, the purpose of the methods provided herein is to alter a gene and/or gene product via gene editing. The nucleobase editing proteins provided herein can be used for gene editing-based human therapeutics in vitro or in vivo. It will be understood by the skilled artisan that the nucleobase editing proteins provided herein, e.g., the fusion proteins or complexes comprising a polynucleotide programmable nucleotide binding domain (e.g., Cas9) and a nucleobase editing domain (e.g., an adenosine deaminase domain or a cytidine deaminase domain) can be used to edit a nucleotide from A to G or C to T.

[0378] Advantageously, base editing systems as provided herein provide genome editing without generating double-strand DNA breaks, without requiring a donor DNA template, and without inducing an excess of stochastic insertions and deletions as CRISPR may do. In some embodiments, the present disclosure provides base editors that efficiently generate an intended mutation, such as a STOP codon, in a nucleic acid (e.g., a nucleic acid within a genome of a subject) without generating a significant number of unintended mutations, such as unintended point mutations.

[0379] The base editors of the disclosure advantageously modify a specific nucleotide base encoding a protein without generating a significant proportion of indels (i.e., insertions or deletions). Such indels can lead to frame shift mutations within a coding region of a gene.

[0380] In some embodiments, the base editors provided herein are capable of generating a ratio of intended mutations to indels (i.e., intended point mutations: unintended point mutations) that is greater than 1:1. In some embodiments, the base editors provided herein are capable of generating a ratio of intended mutations to indels that is at least 1.5:1, at least 2:1, at least 2.5:1, at least 3:1, at least 3.5:1, at least 4:1, at least 4.5:1, at least 5:1, at least 5.5:1, at least 6:1, at least 6.5:1, at least 7:1, at least 7.5:1, at least 8:1, at least 10:1, at least 12:1, at least 15:1, at least 20:1, at least 25:1, at least 30:1, at least 40:1, at least 50:1, at least 100:1, at least 200:1, at least 300:1, at least 400:1, at least 500:1, at least 600:1, at least 700:1, at least 800:1, at least 900:1, or at least 1000:1, or more. The number of intended mutations and indels may be determined using any suitable method.

[0381] In some embodiments, the base editors provided herein can limit formation of indels in a region of a nucleic acid. In some embodiments, the region is at a nucleotide targeted by a base editor or a region within 2, 3, 4, 5, 6, 7, 8, 9, or 10 nucleotides of a nucleotide targeted by a base editor. In some embodiments, any of the base editors provided herein can limit the formation of indels at a region of a nucleic acid to less than 1%, less than 1.5%, less than 2%, less than 2.5%, less than 3%, less than 3.5%, less than 4%, less than 4.5%, less than 5%, less than 6%, less than 7%, less than 8%, less than 9%, less than 10%, less than 12%, less than 15%, or less than 20%.

[0382] Base editing is often referred to as a “modification”, such as, a genetic modification, a gene modification and modification of the nucleic acid sequence and is clearly understandable based on the context that the modification is a base editing modification. A base editing modification is therefore a modification at the nucleotide base level, for example as a result of the deaminase activity discussed throughout the disclosure, which then results in a change in the gene sequence and may affect the gene product.

[0383] In some embodiments, the modification, e.g., single base edit results in about or at least about a 10%, 15%, 20%, 25%, 30%, 35%, 40%, 45%, 50%, 55%, 60%, 65%, 70%, 75%, 80%, 85%, 90%, 95%, 99%, or 100% reduction, or reduction to an undetectable level, of the gene targeted expression.

[0384] The disclosure provides adenosine deaminase variants (e.g., ABE8 variants) that have increased efficiency and specificity. In particular, the adenosine deaminase variants described herein are more likely to edit a desired base within a polynucleotide and are less likely to edit bases that are not intended to be altered (e.g., “bystanders”).

[0385] In some embodiments, any of the base editing system comprising one of the ABE8 base editor variants described herein has reduced bystander editing or mutations by at least 1%, 2%, 3%, 4%, 5%, 10%, 15%, 20%, 25%, 30%, 35%, 40%, 45%, 50%, 55%, 60%, 65%, 70%, 75%, 80%, 85%, 90%, 95%, or 99% compared to a base editor system comprising an ABE7 base editor, e.g., ABE7.10.

[0386] In some embodiments, any of the ABE8 base editor variants described herein has higher base editing efficiency compared to the ABE7 base editors. In some embodiments, any of the ABE8 base editor variants described herein have at least 1%, 2%, 3%, 4%, 5%, 10%, 15%, 20%, 25%, 30%, 35%, 40%, 45%, 50%, 55%, 60%, 65%, 70%, 75%, 80%, 85%, 90%, 95%, 99%, 100%, 105%, 110%, 115%, 120%, 125%, 130%, 135%, 140%, 145%, 150%, 155%, 160%, 165%, 170%, 175%, 180%, 185%, 190%, 195%, 200%, 210%, 220%, 230%, 240%, 250%, 260%, 270%, 280%, 290%, 300%, 310%, 320%, 330%, 340%, 350%, 360%, 370%, 380%, 390%, 400%, 450%, or 500% higher base editing efficiency compared to an ABE7 base editor, e.g., ABE7.10.

[0387] The ABE8 base editor variants described herein may be delivered to a host cell via a plasmid, a vector, a LNP complex, or an mRNA. In some embodiments, any of the ABE8 base editor variants described herein is delivered to a host cell as an mRNA.

[0388] In some embodiments, the method described herein, for example, the base editing methods has minimum to no off-target effects. In some embodiments, the method described herein, for example, the base editing methods, has minimal to no chromosomal translocations.

[0389] In some embodiments, the base editing method described herein results in about 91%, 92%, 93%, 94%, 95%, 96%, 97%, 98%, 99% or 100% of a cell population that have been successfully edited.

[0390] In some embodiments, the percent of viable cells in a cell population following a base editing intervention is greater than at least 60%, 70%, 80%, or 90% of the starting cell population at the time of the base editing event. In some embodiments, the percent of viable cells in a cell population following editing is about 70%. In some embodiments, the percent of viable cells in a cell population following editing is about 75%. In some embodiments, the percent of viable cells in a cell population following editing is about 80%. In some embodiments, the percent of viable cells in a cell population as described above is about 85%. In some embodiments, the percent of viable cells in a cell population as described above is about 90%, or about 91%, 92%, 93%, 94% 95%, 96%, 97%, 98%, 99%, or 100% of the cells in the population at the time of the base editing event.

[0391] In embodiments, the cell population is a population of cells contacted with a base editor, complex, or base editor system of the present disclosure.

[0392] The number of intended mutations and indels can be determined using any suitable method, for example, as described in International PCT Application Nos. PCT/US2017/045381 (WO2018/027078) and PCT/US2016/058344 (WO2017/070632); Komor, A. C., et al., “Programmable editing of a target base in genomic DNA without double-stranded DNA cleavage” Nature 533, 420-424 (2016); Gaudelli, N. M., et al., “Programmable base editing of A·T to G·C in genomic DNA without DNA cleavage” Nature 551, 464-471 (2017); and Komor, A. C., et al., “Improved base excision repair inhibition and bacteriophage Mu Gam protein yields C: G-to-T: A base editors with higher efficiency and product purity” Science Advances 3: eaao4774 (2017); the entire contents of which are hereby incorporated by reference.

[0393] In some embodiments, to calculate indel frequencies, sequencing reads are scanned for exact matches to two 10-bp sequences that flank both sides of a window in which indels can occur. If no exact matches are located, the read is excluded from analysis. If the length of this indel window exactly matches the reference sequence the read is classified as not containing an indel. If the indel window is two or more bases longer or shorter than the reference sequence, then the sequencing read is classified as an insertion or deletion, respectively. In some embodiments, the base editors provided herein can limit formation of indels in a region of a nucleic acid. In some embodiments, the region is at a nucleotide targeted by a base editor or a region within 2, 3, 4, 5, 6, 7, 8, 9, or 10 nucleotides of a nucleotide targeted by a base editor.

### Multiplex Editing

[0394] In some embodiments, the base editor system provided herein is capable of multiplex editing of a plurality of nucleobase pairs in one or more genes or polynucleotide sequences. In some embodiments, the plurality of nucleobase pairs is located in the same gene or in one or more genes, wherein at least one gene is located in a different locus. In some embodiments, the multiplex editing comprises one or more guide polynucleotides. In some embodiments, the multiplex editing comprises one or more base editor systems. In some embodiments, the multiplex editing comprises one or more base editor systems with a single guide polynucleotide or a plurality of guide polynucleotides. In some embodiments, the multiplex editing comprises one or more guide polynucleotides with a single base editor system. It should be appreciated that the characteristics of the multiplex editing using any of the base editors as described herein can be applied to any combination of methods using any base editor provided herein. It should also be appreciated that the multiplex editing using any of the base editors as described herein can comprise a sequential editing of a plurality of nucleobase pairs.

[0395] In some embodiments, the base editor system capable of multiplex editing of a plurality of nucleobase pairs in one or more genes comprises one of ABE7, ABE8, and/or ABE9 base editors.

### Expression of Fusion Proteins or Complexes in a Host Cell

[0396] Fusion proteins or complexes of the disclosure comprising a deaminase may be expressed in virtually any host cell of interest, including but not limited to bacteria, yeast, fungi, insects, plants, and animal cells using routine methods known to the skilled artisan. For example, a DNA encoding an adenosine deaminase of the disclosure can be cloned by designing suitable primers for the upstream and downstream of CDS based on the cDNA sequence. The cloned DNA may be directly, or after digestion with a restriction enzyme when desired, or after addition of a suitable linker and/or a nuclear localization signal, ligated with a DNA encoding one or more additional components of a base editing system. The base editing system is translated in a host cell to form a complex.

[0397] A polynucleotide encoding a polypeptide described herein can be obtained by chemically synthesizing the polynucleotide, or by connecting synthesized partly overlapping oligo short chains by utilizing the PCR method and the Gibson Assembly method to construct a polynucleotide (e.g., DNA) encoding the full length thereof. The advantage of constructing a full-length polynucleotide by chemical synthesis or a combination of PCR method or Gibson Assembly method is that the codons to be used can be selected in according to the host into which the polynucleotide is to be introduced. In the expression from a heterologous DNA molecule, the protein expression level is expected to increase by converting the DNA sequence thereof to a codon highly frequently used in the host organism. Codon use data for a host cell (e.g., codon use data available at kazusa.or.jp/codon/index.html) can be used to guide codon optimization for a polynucleotide sequence encoding a polypeptide. Codons having low use frequency in the host may be converted to a codon coding the same amino acid and having high use frequency.

[0398] An expression vector containing a polynucleotide encoding a nucleic acid sequence-recognizing module and/or a nucleic acid base converting enzyme can be produced, for example, by linking the DNA to the downstream of a promoter in a suitable expression vector.

[0399] As the expression vector, Escherichia coli-derived plasmids (e.g., pBR322, pBR325, pUC12, pUC13); Bacillus subtilis-derived plasmids (e.g., pUB110, pTP5, pC194); yeast-derived plasmids (e.g., pSH19, pSH15); insect cell expression plasmids (e.g., pFast-Bac); animal cell expression plasmids (e.g., pA1-11, pXT1, pRc/CMV, pRc/RSV, pcDNAI/Neo); bacteriophages such as .lambda phage and the like; insect virus vectors such as baculovirus and the like (e.g., BmNPV, AcNPV); animal virus vectors such as retrovirus, vaccinia virus, adenovirus and the like, and the like are used.

[0400] Regarding the promoter to be used, any promoter appropriate for a host to be used for gene expression can be used. In a conventional method using double-stranded breaks, since the survival rate of the host cell sometimes reduces markedly due to the toxicity, it is desirable to increase the number of cells by the start of the induction by using an inductive promoter. However, since sufficient cell proliferation can also be afforded by expressing the nucleic acid-modifying enzyme complex of the present disclosure, a constitutive promoter can be used without limitation.

[0401] For example, when the host is an animal cell, an SR.alpha. promoter, SV40 promoter, LTR promoter, cytomegalovirus (CMV) promoter, Rous sarcoma virus (RSV) promoter, Moloney mouse leukemia virus (MoMuLV), LTR, herpes simplex virus thymidine kinase (HSV-TK) promoter, and the like can be used. Of these, CMV promoter, SR.alpha. promoter and the like may be used.

[0402] When the host is Escherichia coli, a trp promoter, lac promoter, recA promoter, .lamda.P.sub.L promoter, lpp promoter, T7 promoter, and the like can be used.

[0403] When the host is in the genus Bacillus, the SPO1 promoter, SPO2 promoter, penP promoter, and the like can be used.

[0404] When the host is a yeast, the Gal1/10 promoter, PHO5 promoter, PGK promoter, GAP promoter, ADH promoter, and the like can be used.

[0405] When the host is an insect cell, the polyhedrin promoter, P10 promoter, and the like can be used.

[0406] When the host is a plant cell, the CaMV35S promoter, CaMV19S promoter, NOS promoter, and the like can be used.

[0407] Expression vectors for use in the present disclosure, besides those mentioned above, can comprise an enhancer, a splicing signal, a terminator, a poly A addition signal, a selection marker such as drug resistance gene, an auxotrophic complementary gene and the like, a replication origin, and the like can be used.

[0408] An RNA encoding a protein domain described herein can be prepared by, for example, in vitro transcription of a nucleic acid sequence encoding any of the fusion proteins or complexes disclosed herein.

[0409] A fusion protein or complex of the disclosure can be intracellularly expressed by introducing into the cell an expression vector comprising a nucleic acid sequence encoding the fusion protein or complex.

[0410] Host cells of interest, include but are not limited to bacteria, yeast, fungi, insects, plants, and animal cells. For example, a host cell may comprise bacteria from the genus Escherichia, such as Escherichia coli K12.cndot.DH1 [Proc. Natl. Acad. Sci. USA, 60, 160 (1968)], Escherichia coli JM103 [Nucleic Acids Research, 9, 309 (1981)], Escherichia coli JA221 [Journal of Molecular Biology, 120, 517 (1978)], Escherichia coli HB101 [Journal of Molecular Biology, 41, 459 (1969)], Escherichia coli C600 [Genetics, 39, 440 (1954)] and the like.

[0411] A host cell may comprise bacteria from the genus Bacillus, for example Bacillus subtilis M1114 [Gene, 24, 255 (1983)], Bacillus subtilis 207-21 [Journal of Biochemistry, 95, 87 (1984)] and the like.

[0412] A host cell may be a yeast cell. Examples of yeast cells include Saccharomyces cerevisiae AH22, AH22R.sup.-, NA87-11A, DKD-5D, 20B-12, Schizosaccharomyces pombe NCYC1913, NCYC2036, Pichia pastoris KM71 and the like.

[0413] When the viral delivery methods utilize the virus AcNPV, cells from a cabbage armyworm larva-derived established line (Spodoptera frugiperda cell; Sf cell), MG1 cells derived from the mid-intestine of Trichoplusia ni, High Five™ cells derived from an ovary of Trichoplusia ni, Mamestra brassicae-derived cells, Estigmena acrea-derived cells and the like can be used. When the virus is BmNPV, cells of Bombyx mori-derived established line (Bombyx mori N cell; BmN cell) and the like are used. As the Sf cell, for example, Sf9 cell (ATCC CRL1711), Sf21 cell [all above, In Vivo, 13, 213-217 (1977)] and the like are used.

[0414] An insect can be any insect, for example, larva of Bombyx mori, Drosophila, cricket, and the like [Nature, 315, 592 (1985)].

[0415] Animal cells contemplated in the present disclosure include, but are not limited to, cell lines such as monkey COS-7 cells, monkey Vero cells, Chinese hamster ovary (CHO) cells, dhfr gene-deficient CHO cells, mouse L cells, mouse AtT-20 cells, mouse myeloma cells, rat GH3 cells, human FL cells and the like, pluripotent stem cells such as iPS cells, ES cells derived humans and other mammals, and primary cultured cells prepared from various tissues. Furthermore, zebrafish embryo, Xenopus oocyte, and the like can also be used.

[0416] Plant cells are also contemplated in the present disclosure. Plant cells include, but are not limited to, suspended cultured cells, callus, protoplast, leaf segment, root segment and the like prepared from various plants (e.g., grain such as rice, wheat, corn, and the like; product crops such as tomato, cucumber, eggplant and the like; garden plants such as carnations, Eustoma russellianum, and the like; and other plants such as tobacco, Arabidopsis thaliana and the like) are used.

[0417] All the above-mentioned host cells may be haploid (monoploid), or polyploid (e.g., diploid, triploid, tetraploid, etc.). Using conventional methods, mutations, in principle, introduced into only one homologous chromosome produce a heterogenous cell. Therefore, the desired phenotype is not expressed unless the mutation is dominant. For recessive mutations, acquiring a homozygous cell can be inconvenient due to labor and time requirements. In contrast, according to the present disclosure, since a mutation can be introduced into any allele on the homologous chromosome in the genome, the desired phenotype can be expressed in a single generation even in the case of recessive mutation, thereby solving the problem associated with conventional mutagenesis methods.

[0418] An expression vector can be introduced by a known method (e.g., the lysozyme method, the competent method, the PEG method, the CaCl₂) coprecipitation method, electroporation, microinjection, particle gun method, lipofection, Agrobacterium-mediated delivery, etc.) according to the kind of the host.

[0419] Escherichia coli can be transformed according to the methods described in, for example, Proc. Natl. Acad. Sci. USA, 69, 2110 (1972), Gene, 17, 107 (1982).

[0420] The genus Bacillus can be introduced into a vector according to the methods described in, for example, Molecular & General Genetics, 168, 111 (1979).

[0421] A yeast can be introduced into a vector according to the methods described in, for example, Methods in Enzymology, 194, 182-187 (1991), Proc. Natl. Acad. Sci. USA, 75, 1929 (1978).

[0422] An insect cell and an insect can be introduced into a vector according to the methods described in, for example, Bio/Technology, 6, 47-55 (1988).

[0423] A vector can be introduced into an animal cell according to the methods described in, for example, Cell Engineering additional volume 8, New Cell Engineering Experiment Protocol, 263-267 (1995) (published by Shujunsha), and Virology, 52, 456 (1973).

[0424] A cell comprising a vector can be cultured according to a known method according to the kind of the host. For example, when Escherichia coli or genus Bacillus is cultured, a liquid medium may be used as a medium to be used for the culture. The medium may contain a carbon source, nitrogen source, inorganic substance and the like necessary for the growth of the transformant. Examples of the carbon source include glucose, dextrin, soluble starch, sucrose and the like; examples of the nitrogen source include inorganic or organic substances such as ammonium salts, nitrate salts, corn steep liquor, peptone, casein, meat extract, soybean cake, potato extract and the like; and examples of the inorganic substance include calcium chloride, sodium dihydrogen phosphate, magnesium chloride and the like. The medium may contain yeast extract, vitamins, growth promoting factor and the like. The pH of the medium is between about 5 about 8 in embodiments.

[0425] As a medium for culturing Escherichia coli, for example, M9 medium containing glucose, casamino acid [Journal of Experiments in Molecular Genetics, 431-433, Cold Spring Harbor Laboratory, New York 1972] can be used. Where necessary, for example, agents such as 3B-indolylacrylic acid may be added to the medium to ensure an efficient function of a promoter. Escherichia coli is cultured at generally about 15 to about 43° C. Where necessary, aeration and stirring may be performed.

[0426] The genus Bacillus is cultured at generally about 30 to about 40° C. Where necessary, aeration and stirring may be performed.

[0427] Examples of the medium for culturing yeast include Burkholder minimum medium [Proc. Natl. Acad. Sci. USA, 77, 4505 (1980)], SD medium containing 0.5% casamino acid [Proc. Natl. Acad. Sci. USA, 81, 5330 (1984)] and the like. The pH of the medium may be between about 5 to about 8. The culture is performed at generally about 20° C. to about 35° C. Where necessary, aeration and stirring may be performed.

[0428] As a medium for culturing an insect cell or insect, for example, Grace's Insect Medium [Nature, 195, 788 (1962)] containing an additive such as inactivated 10% bovine serum and the like as appropriate and the like are used. The pH of the medium is may be between about 6.2 to about 6.4. The culture is performed at generally about 27° C. Where necessary, aeration and stirring may be performed.

[0429] As a medium for culturing an animal cell, for example, minimum essential medium (MEM) containing about 5 to about 20% of fetal bovine serum [Science, 122, 501 (1952)], Dulbecco's modified Eagle medium (DMEM) [Virology, 8, 396 (1959)], RPMI 1640 medium [The Journal of the American Medical Association, 199, 519 (1967)], 199 medium [Proceeding of the Society for the Biological Medicine, 73, 1 (1950)] and the like are used. The pH of the medium may be between about 6 to about 8. The culture is performed at generally about 30° C. to about 40° C. Where necessary, aeration and stirring may be performed.

[0430] As a medium for culturing a plant cell, for example, MS medium, LS medium, B5 medium and the like are used. The pH of the medium may be between about 5-about 8. The culture is performed at generally about 20° C. to about 30° C. Where necessary, aeration and stirring may be performed.

[0431] When a higher eukaryotic cell, such as animal cell, insect cell, plant cell and the like is used as a host cell, a polynucleotide encoding a base editing system of the present disclosure (e.g., comprising an adenosine deaminase variant) is introduced into a host cell under the regulation of an inducible promoter (e.g., metallothionein promoter (induced by heavy metal ion), heat shock protein promoter (induced by heat shock), Tet-ON/Tet-OFF system promoter (induced by addition or removal of tetracycline or a derivative thereof), steroid-responsive promoter (induced by steroid hormone or a derivative thereof) etc.), the induction substance is added to the medium (or removed from the medium) at an appropriate stage to induce expression of the nucleic acid-modifying enzyme complex, culture is performed for a given period to carry out a base editing and, introduction of a mutation into a target gene, transient expression of the base editing system can be realized.

[0432] Prokaryotic cells such as Escherichia coli and the like can utilize an inducible promoter. Examples of the inducible promoter include, but are not limited to, lac promoter (induced by IPTG), cspA promoter (induced by cold shock), araBAD promoter (induced by arabinose) and the like.

[0433] Alternatively, the above-mentioned inductive promoter can also be utilized as a vector removal mechanism when higher eukaryotic cells, such as animal cell, insect cell, plant cell and the like are used as a host cell. That is, a vector is mounted with a replication origin that functions in a host cell, and a nucleic acid encoding a protein necessary for replication (e.g., SV40 on and large T antigen, oriP and EBNA-1 etc. for animal cells), of the expression of the nucleic acid encoding the protein is regulated by the above-mentioned inducible promoter. As a result, while the vector is autonomously replicable in the presence of an induction substance, when the induction substance is removed, autonomous replication is not available, and the vector naturally falls off along with cell division (autonomous replication is not possible by the addition of tetracycline and doxycycline in Tet-OFF system vector).

### Delivery Systems

### Nucleic Acid-Based Delivery of Base Editor Systems

[0434] Nucleic acid molecules encoding a base editor system according to the present disclosure can be administered to subjects or delivered into cells in vitro or in vivo by art-known methods or as described herein. For example, a base editor system comprising a deaminase (e.g., cytidine or adenine deaminase) can be delivered by vectors (e.g., viral or non-viral vectors), or by naked DNA, DNA complexes, lipid nanoparticles, or a combination of the aforementioned compositions. A base editor system may be delivered to a cell using any methods available in the art including, but not limited to, physical methods (e.g., electroporation, particle gun, calcium phosphate transfection), viral methods, non-viral methods (e.g., liposomes, cationic methods, lipid nanoparticles, polymeric nanoparticles), or biological non-viral methods (e.g., attenuated bacterial, engineered bacteriophages, mammalian virus-like particles, biological liposomes, erythrocyte ghosts, exosomes).

[0435] Nanoparticles, which can be organic or inorganic, are useful for delivering a base editor system or component thereof. Nanoparticles are well known in the art and any suitable nanoparticle can be used to deliver a base editor system or component thereof, or a nucleic acid molecule encoding such components. In one example, organic (e.g., lipid and/or polymer) nanoparticles are suitable for use as delivery vehicles in certain embodiments of this disclosure.

[0436] Non-limiting examples of lipid nanoparticles suitable for use in the methods of the present disclosure include those described in International Patent Application Publications No. WO2022140239, WO2022140252, WO2022140238, WO2022159421, WO2022159472, WO2022159475, WO2022159463, WO2021113365, and WO2021141969, the disclosures of each of which is incorporated herein by reference in its entirety for all purposes.

### Viral Vectors

[0437] A base editor described herein can be delivered with a viral vector. In some embodiments, a base editor disclosed herein can be encoded on a nucleic acid that is contained in a viral vector. In some embodiments, one or more components of the base editor system can be encoded on one or more viral vectors.

[0438] Viral vectors can include lentivirus (e.g., HIV and FIV-based vectors), Adenovirus (e.g., AD100), Retrovirus (e.g., Maloney murine leukemia virus, MML-V), herpesvirus vectors (e.g., HSV-2), and Adeno-associated viruses (AAVs), or other plasmid or viral vector types, in particular, using formulations and doses from, for example, U.S. Pat. No. 8,454,972 (formulations, doses for adenovirus), U.S. Pat. No. 8,404,658 (formulations, doses for AAV) and U.S. Pat. No. 5,846,946 (formulations, doses for DNA plasmids) and from clinical trials and publications regarding the clinical trials involving lentivirus, AAV and adenovirus. For example, for AAV, the route of administration, formulation and dose can be as in U.S. Pat. No. 8,454,972 and as in clinical trials involving AAV. For Adenovirus, the route of administration, formulation and dose can be as in U.S. Pat. No. 8,404,658 and as in clinical trials involving adenovirus. For plasmid delivery, the route of administration, formulation and dose can be as in U.S. Pat. No. 5,846,946 and as in clinical studies involving plasmids. Doses can be based on or extrapolated to an average 70 kg individual (e.g., a male adult human), and can be adjusted for patients, subjects, mammals of different weight and species. Frequency of administration is within the ambit of the medical or veterinary practitioner (e.g., physician, veterinarian), depending on usual factors including the age, sex, general health, other conditions of the patient or subject and the particular condition or symptoms being addressed. The viral vectors can be injected into the tissue of interest. For cell-type specific base editing, the expression of the base editor and optional guide nucleic acid can be driven by a cell-type specific promoter.

[0439] Viral vectors can be selected based on the application. For example, for in vivo gene delivery, AAV can be advantageous over other viral vectors. In some embodiments, AAV allows low toxicity, which can be due to the purification method not requiring ultra-centrifugation of cell particles that can activate the immune response. In some embodiments, AAV allows low probability of causing insertional mutagenesis because it doesn't integrate into the host genome. Adenoviruses are commonly used as vaccines because of the strong immunogenic response they induce. Packaging capacity of the viral vectors can limit the size of the base editor that can be packaged into the vector.

[0440] AAV has a packaging capacity of about 4.5 Kb or 4.75 Kb including two 145 base inverted terminal repeats (ITRs). This means disclosed base editor as well as a promoter and transcription terminator can fit into a single viral vector. Constructs larger than 4.5 or 4.75 Kb can lead to significantly reduced virus production. For example, SpCas9 is quite large, the gene itself is over 4.1 Kb, which makes it difficult for packing into AAV. Therefore, embodiments of the present disclosure include utilizing a disclosed base editor which is shorter in length than conventional base editors. In some examples, the base editors are less than 4 kb. Disclosed base editors can be less than 4.5 kb, 4.4 kb, 4.3 kb, 4.2 kb, 4.1 kb, 4 kb, 3.9 kb, 3.8 kb, 3.7 kb, 3.6 kb, 3.5 kb, 3.4 kb, 3.3 kb, 3.2 kb, 3.1 kb, 3 kb, 2.9 kb, 2.8 kb, 2.7 kb, 2.6 kb, 2.5 kb, 2 kb, or 1.5 kb. In some embodiments, the disclosed base editors are 4.5 kb or less in length.

[0441] An AAV can be AAV1, AAV2, AAV5, AAV6 or any combination thereof. One can select the type of AAV with regard to the cells to be targeted; e.g., one can select AAV serotypes 1, 2, 5 or a hybrid capsid AAV1, AAV2, AAV5 or any combination thereof for targeting brain or neuronal cells; and one can select AAV4 for targeting cardiac tissue. AAV8 is useful for delivery to the liver. A tabulation of certain AAV serotypes as to these cells can be found in Grimm, D. et al, J. Virol. 82:5887-5911 (2008)).

[0442] In some embodiments, lentiviral vectors are used to transduce a cell of interest with a polynucleotide encoding a base editor or base editor system as provided herein. Lentiviruses are complex retroviruses that have the ability to infect and express their genes in both mitotic and post-mitotic cells. The most commonly known lentivirus is the human immunodeficiency virus (HIV), which uses the envelope glycoproteins of other viruses to target a broad range of cell types.

[0443] In another embodiment, minimal non-primate lentiviral vectors based on the equine infectious anemia virus (EIAV) are also contemplated. In another embodiment, RetinoStat®, an equine infectious anemia virus-based lentiviral gene therapy vector that expresses angiostatic proteins endostatin and angiostatin that is contemplated to be delivered via a subretinal injection. In another embodiment, use of self-inactivating lentiviral vectors are contemplated.

[0444] Any RNA of the systems, for example a guide RNA or a base editor-encoding mRNA, can be delivered in the form of RNA. Base editor-encoding mRNA can be generated using in vitro transcription. For example, nuclease mRNA can be synthesized using a PCR cassette containing the following elements: T7 promoter, optional kozak sequence (GCCACC), nuclease sequence, and 3′ UTR such as a 3′ UTR from beta globin-polyA tail. The cassette can be used for transcription by T7 polymerase. Guide polynucleotides (e.g., gRNA) can also be transcribed using in vitro transcription from a cassette containing a T7 promoter, followed by the sequence “GG”, and guide polynucleotide sequence.

### Non-Viral Platforms for Gene Transfer

[0445] Non-viral platforms for introducing a heterologous polynucleotide into a cell of interest are known in the art.

[0446] For example, the disclosure provides a method of inserting a heterologous polynucleotide into the genome of a cell using a Cas9 or Cas12 (e.g., Cas12b) ribonucleoprotein complex (RNP)-DNA template complex where an RNP including a Cas9 or Cas12 nuclease domain and a guide RNA, wherein the guide RNA specifically hybridizes to a target region of the genome of the cell, and wherein the Cas nuclease domain cleaves the target region to create an insertion site in the genome of the cell. A DNA template is then used to introduce a heterologous polynucleotide. In embodiments, the DNA template is a double-stranded or single-stranded DNA template, wherein the size of the DNA template is about 200 nucleotides or is greater than about 200 nucleotides, wherein the 5′ and 3′ ends of the DNA template comprise nucleotide sequences that are homologous to genomic sequences flanking the insertion site. In some embodiments, the DNA template is a single-stranded circular DNA template. In embodiments, the molar ratio of RNP to DNA template in the complex is from about 3:1 to about 100:1.

[0447] In some embodiments, the DNA template is a linear DNA template. In some examples, the DNA template is a single-stranded DNA template. In certain embodiments, the single-stranded DNA template is a pure single-stranded DNA template. In some embodiments, the single stranded DNA template is a single-stranded oligodeoxynucleotide (ssODN).

[0448] In other embodiments, a single-stranded DNA (ssDNA) can produce efficient homology-directed repair (HDR) with minimal off-target integration. In one embodiment, an ssDNA phage is used to efficiently and inexpensively produce long circular ssDNA (cssDNA) donors. These cssDNA donors serve as efficient HDR templates when used with Cas9 or Cas12 (e.g., Cas12a, Cas12b), with integration frequencies superior to linear ssDNA (IssDNA) donors.

[0449] In some embodiments, a heterologous polynucleotide may be inserted into the genome of a cell using a transposable element such as a transposon, as described, for example, in Tipanee, et al. Human Gene Therapy, November 2017, 1087-1104, DOI: 10.1089/hum.2017.128. Transposable elements are divided into two categories: retrotransposons and DNA transposons. Transposable elements can alter the genome of the host cells through insertions, duplications, deletions, and translocations. Retrotransposons are described as mobile elements that employ an RNA intermediate that is first reverse transcribed into a complementary single-stranded (c) DNA strand by a reverse transcriptase encoded by the retrotransposon. Subsequently, the single-stranded DNA is converted into a double-stranded DNA that then integrates into the host genome. This so-called “replicative mechanism” yields several new copies of retrotransposons expanding throughout the target genome over evolutionary time. Retrotransposons are categorized into many subtypes according to the DNA sequences of the long terminal repeats and its open reading frames. Retrotransposons are employed to enable transgene integration into the target cell DNA, in some cases relying on adenoviral delivery. Alternatively, DNA transposons translocate via a “non-replicative mechanism,” whereby two Terminal Inverted Repeats (TIRs) are recognized and cleaved by a transposase enzyme, releasing the cognate DNA transposons with free DNA ends. The excised DNA transposons then integrate into a new genomic region where target sites are recognized and cut by the same transposase. This cut-and-paste mechanism usually duplicates DNA target sites upon insertion, leaving target site duplications (TSDs). Non-limiting examples of transposons include the Sleeping Beauty (SB) transposon, the piggyBac (PB) transposon, and Tol2 transposable elements.

### Inteins

[0450] Inteins (intervening protein) are auto-processing domains found in a variety of diverse organisms, which carry out a process known as protein splicing.

[0451] Non-limiting examples of inteins include any intein or intein-pair known in the art, which include a synthetic intein based on the dnaE intein, the Cfa-N (e.g., split intein-N) and Cfa-C (e.g., split intein-C) intein pair, has been described (e.g., in Stevens et al., J Am Chem Soc. 2016 Feb. 24; 138 (7): 2162-5, incorporated herein by reference), and DnaE. Non-limiting examples of pairs of inteins that may be used in accordance with the present disclosure include: Cfa DnaE intein, Ssp GyrB intein, Ssp DnaX intein, Ter DnaE3 intein, Ter Thy X intein, Rma DnaB intein and Cne Prp8 intein (e.g., as described in U.S. Pat. No. 8,394,604, incorporated herein by reference). Exemplary nucleotide and amino acid sequences of inteins are provided in the Sequence Listing at SEQ ID NOs: 370-377 and 389-424. Inteins suitable for use in embodiments of the present disclosure and methods for use thereof are described in U.S. Pat. No. 10,526,401, International Patent Application Publication No. WO 2013/045632 or WO 2020/051561, and in U.S. Patent Application Publication No. US 2020/0055900, the full disclosures of which are incorporated herein by reference in their entireties by reference for all purposes.

[0452] Intein-N and intein-C may be fused to the N-terminal portion of a split Cas9 and the C-terminal portion of the split Cas9, respectively, for the joining of the N-terminal portion of the split Cas9 and the C-terminal portion of the split Cas9. For example, in some embodiments, an intein-N is fused to the C-terminus of the N-terminal portion of the split Cas9, i.e., to form a structure of N—[N-terminal portion of the split Cas9]-[intein-N]—C. In some embodiments, an intein-C is fused to the N-terminus of the C-terminal portion of the split Cas9, i.e., to form a structure of N-[intein-C]—[C-terminal portion of the split Cas9]-C. In embodiments, a base editor is encoded by two polynucleotides, where one polynucleotide encodes a fragment of the base editor fused to an intein-N and another polynucleotide encodes a fragment of the base editor fused to an intein-C. Methods for designing and using inteins are known in the art and described, for example by WO2014004336, WO2017132580, WO2013045632A1, US20150344549, and US20180127780, each of which is incorporated herein by reference in their entirety.

[0453] In some embodiments, an ABE was split into N- and C-terminal fragments at Ala, Ser, Thr, or Cys residues within selected regions of SpCas9. These regions correspond to loop regions identified by Cas9 crystal structure analysis.

[0454] The N-terminus of each fragment is fused to an intein-N and the C-terminus of each fragment is fused to an intein C at amino acid positions S303, T310, T313, S355, A456, S460, A463, T466, S469, T472, T474, C574, S577, A589, and S590, referenced to SEQ ID NO: 197.

### Pharmaceutical Compositions

[0455] In some aspects, the present disclosure provides a pharmaceutical composition comprising any of the cells, polynucleotides, vectors, base editors, base editor systems, guide polynucleotides, fusion proteins, complexes, or the fusion protein-guide polynucleotide complexes described herein.

[0456] The pharmaceutical compositions of the present disclosure can be prepared in accordance with known techniques. See, e.g., Remington, The Science And Practice of Pharmacy (21st ed. 2005). In general, the cell, or population thereof is admixed with a suitable carrier prior to administration or storage, and in some embodiments, the pharmaceutical composition further comprises a pharmaceutically acceptable carrier. Suitable pharmaceutically acceptable carriers generally comprise inert substances that aid in administering the pharmaceutical composition to a subject, aid in processing the pharmaceutical compositions into deliverable preparations, or aid in storing the pharmaceutical composition prior to administration. Pharmaceutically acceptable carriers can include agents that can stabilize, optimize or otherwise alter the form, consistency, viscosity, pH, pharmacokinetics, solubility of the formulation. Such agents include buffering agents, wetting agents, emulsifying agents, diluents, encapsulating agents, and skin penetration enhancers. For example, carriers can include, but are not limited to, saline, buffered saline, dextrose, arginine, sucrose, water, glycerol, ethanol, sorbitol, dextran, sodium carboxymethyl cellulose, and combinations thereof.

[0457] In some embodiments, the pharmaceutical composition is formulated for delivery to a subject. Suitable routes of administrating the pharmaceutical composition described herein include, without limitation: topical, subcutaneous, transdermal, intradermal, intralesional, intraarticular, intraperitoneal, intravesical, transmucosal, gingival, intradental, intracochlear, transtympanic, intraorgan, epidural, intrathecal, intramuscular, intravenous, intravascular, intraosseus, periocular, intratumoral, intracerebral, and intracerebroventricular administration.

[0458] In some embodiments, the pharmaceutical composition described herein is administered locally to a diseased site (e.g., the site of a neoplasia). In some embodiments, the pharmaceutical composition described herein is administered to a subject by injection, by means of a catheter, by means of a suppository, or by means of an implant, the implant being of a porous, non-porous, or gelatinous material, including a membrane, such as a sialastic membrane, or a fiber.

[0459] In some embodiments, any of the fusion proteins, gRNAs, and/or complexes described herein are provided as part of a pharmaceutical composition. In some embodiments, the pharmaceutical composition comprises any of the fusion proteins or complexes provided herein.

[0460] In some embodiments pharmaceutical composition comprises a gRNA, a nucleic acid programmable DNA binding protein, a cationic lipid, and a pharmaceutically acceptable excipient. In embodiments, pharmaceutical compositions comprise a lipid nanoparticle and a pharmaceutically acceptable excipient. In embodiments, the lipid nanoparticle contains a gRNA, a base editor, a complex, a base editor system, or a component thereof of the present disclosure, and/or one or more polynucleotides encoding the same. Pharmaceutical compositions can optionally comprise one or more additional therapeutically active substances.

[0461] The compositions, as described above, can be administered in effective amounts. The effective amount will depend upon the mode of administration, the particular condition being treated, and the desired outcome. It may also depend upon the stage of the condition, the age and physical condition of the subject, the nature of concurrent therapy, if any, and like factors well-known to the medical practitioner. For therapeutic applications, it is that amount sufficient to achieve a medically desirable result.

[0462] In some embodiments, compositions in accordance with the present disclosure can be used for treatment of any of a variety of diseases, disorders, and/or conditions.

### Methods of Treatment

[0463] Some aspects of the present disclosure provide methods of treating a subject in need, the method comprising administering to a subject in need an effective therapeutic amount of a pharmaceutical composition as described herein. More specifically, the methods of treatment include administering to a subject in need thereof one or more pharmaceutical compositions comprising one or more cells having at least one edited gene. In other embodiments, the methods of the disclosure comprise expressing or introducing into a cell a base editor polypeptide and one or more guide RNAs capable of targeting a nucleic acid molecule encoding at least one polypeptide.

[0464] One of ordinary skill in the art would recognize that multiple administrations of the pharmaceutical compositions contemplated in particular embodiments may be required to affect the desired therapy. For example, a composition may be administered to the subject 1, 2, 3, 4, 5, 6, 7, 8, 9, or 10 or more times over a span of 1 week, 2 weeks, 3 weeks, 1 month, 2 months, 3 months, 4 months, 5 months, 6 months, 1 year, 2 years, 5, years, 10 years, or more.

[0465] Administration of the pharmaceutical compositions contemplated herein may be carried out using conventional techniques including, but not limited to, infusion, transfusion, or parenterally. In some embodiments, parenteral administration includes infusing or injecting intravascularly, intravenously, intramuscularly, intraarterially, intrathecally, intratumorally, intradermally, intraperitoneally, transtracheally, subcutaneously, subcuticularly, intraarticularly, subcapsularly, subarachnoidly and intrasternally.

### Kits

[0466] The disclosure provides kits for the treatment of a disease or disorder (e.g., a neoplasia, such as a tumor or cancer) in a subject. In some embodiments, the kit includes a polypeptide of the disclosure (e.g., a base editor, beta-2-microglobulin, or a HLA class-I single-chain dimer or trimer) and/or a polynucleotide encoding the same. In some embodiments, the kit further includes a base editor system or a polynucleotide encoding a base editor system, wherein the base editor polypeptide system a nucleic acid programmable DNA binding protein (napDNAbp), a deaminase, and a guide RNA. In some embodiments, the napDNAbp is Cas9 or Cas12. In some embodiments, the polynucleotide encoding the base editor is a mRNA sequence. In some embodiments, the deaminase is a cytidine deaminase or an adenosine deaminase. In some embodiments, the kit comprises an edited cell and instructions regarding the use of the cell.

[0467] The kits may further comprise written instructions for using a polynucleotide, polypeptide, base editor, base editor system and/or edited cell as described herein. In other embodiments, the instructions include at least one of the following: precautions; warnings; clinical studies; and/or references. The instructions may be printed directly on the container (when present), or as a label applied to the container, or as a separate sheet, pamphlet, card, or folder supplied in or with the container. In a further embodiment, a kit comprises instructions in the form of a label or separate insert (package insert) for suitable operational parameters. In yet another embodiment, the kit comprises one or more containers with appropriate positive and negative controls or control samples, to be used as standard(s) for detection, calibration, or normalization. The kit can further comprise a second container comprising a pharmaceutically-acceptable buffer, such as (sterile) phosphate-buffered saline, Ringer's solution, or dextrose solution. It can further include other materials desirable from a commercial and user standpoint, including other buffers, diluents, filters, needles, syringes, and package inserts with instructions for use.

[0468] The practice of embodiments of the present disclosure employs, unless otherwise indicated, conventional techniques of molecular biology (including recombinant techniques), microbiology, cell biology, biochemistry and immunology, which are well within the purview of the skilled artisan. Such techniques are explained fully in the literature, such as, “Molecular Cloning: A Laboratory Manual”, second edition (Sambrook, 1989); “Oligonucleotide Synthesis” (Gait, 1984); “Animal Cell Culture” (Freshney, 1987); “Methods in Enzymology” “Handbook of Experimental Immunology” (Weir, 1996); “Gene Transfer Vectors for Mammalian Cells” (Miller and Calos, 1987); “Current Protocols in Molecular Biology” (Ausubel, 1987); “PCR: The Polymerase Chain Reaction”, (Mullis, 1994); “Current Protocols in Immunology” (Coligan, 1991). These techniques are applicable to the production of the polynucleotides and polypeptides of the disclosure, and, as such, may be considered in making and practicing embodiments of the disclosure. Particularly useful techniques for particular embodiments will be discussed in the sections that follow.

[0469] The following examples are put forth so as to provide those of ordinary skill in the art with a complete disclosure and description of how to make and use the assay, screening, and therapeutic methods of the disclosure, and are not intended to limit the scope of what the inventors regard as their invention.

### EXAMPLES

### Example 1: HLA-Class I Attenuated Allogeneic Immune Cells Showed Improved Protection from Lysis by Immune Effector Cells

[0470] Experiments were undertaken to develop allogeneic T cells with improved resistance to lysis by alloreactive T cells by modifying allogeneic T cells to have attenuated surface-expression of HLA class-I polypeptides (see FIG. 1). Throughout the present Example, the allogeneic T cells were isolated from a leukopak blood collection from a de-identified healthy human donor. To prepare the allogeneic T cells with attenuated surface-expression of the HLA class-I polypeptides, HLA-A, HLA-B, and HLA-C, the allogeneic T cells were first edited to knock out endogenous expression of beta-2-microglobulin (B2M) by contacting the cells with a base editor (ABE8.20m) and a guide RNA (gRNA; see TSBTx760 of Table 1) targeting the base editor to modify a nucleobase of the B2M gene, where the modification knocked out expression of a functional B2M polypeptide encoded by the unedited B2M gene and yielded B2M knock-out cells (B2M KO). Next, B2M expression was reconstituted in the B2M KO cells by 1) expressing B2M in the cells under the control of a promoter that directed expression of reduced levels of B2M in the cells relative to levels in a wild-type cell; and 2) expressing in the cells a B2M polypeptide containing an amino acid alteration(s) (e.g., W60G, W95G) that reduces the affinity of B2M for HLA class-I heavy chain polypeptides, HLA-A, HLA-B, and HLA-C.

[0471] Lentiviral vectors were prepared containing polynucleotides encoding a chimeric antigen receptor (CAR) containing a CD4 extracellular domain and either a wild type B2M (B2M (WT)) polypeptide or a B2M polypeptide containing a W60G modification (B2M (W60G)) expressed under the control of the human EF1-alpha promoter (FIG. 2A; GCTCCGGTGCCCGTCAGTGGGCAGAGCGCACATCGCCCACAGTCCCCGAGAAGTTGGGGGGAGG GGTCGGCAATTGAACCGGTGCCTAGAGAAGGTGGCGCGGGGTAAACTGGGAAAGTGATGTCGTG TACTGGCTCCGCCTTTTTCCCGAGGGTGGGGGAGAACCGTATATAAGTGCAGTAGTCGCCGTGA ACGTTCTTTTTCGCAACGGGTTTGCCGCCAGAACACAGGTAAGTGCCGTGTGTGGTTCCCGCGG GCCTGGCCTCTTTACGGGTTATGGCCCTTGCGTGCCTTGAATTACTTCCACGCCCCTGGCTGCA GTACGTGATTCTTGATCCCGAGCTTCGGGTTGGAAGTGGGTGGGAGAGTTCGAGGCCTTGCGCT TAAGGAGCCCCTTCGCCTCGTGCTTGAGTTGAGGCCTGGCCTGGGCGCTGGGGCCGCCGCGTGC GAATCTGGTGGCACCTTCGCGCCTGTCTCGCTGCTTTCGATAAGTCTCTAGCCATTTAAAATTT TTGATGACCTGCTGCGACGCTTTTTTTCTGGCAAGATAGTCTTGTAAATGCGGGCCAAGATCTG CACACTGGTATTTCGGTTTTTGGGGCCGCGGGCGGCGACGGGGCCCGTGCGTCCCAGCGCACAT GTTCGGCGAGGCGGGGCCTGCGAGCGCGGCCACCGAGAATCGGACGGGGGTAGTCTCAAGCTGG CCGGCCTGCTCTGGTGCCTGGCCTCGCGCCGCCGTGTATCGCCCCGCCCTGGGCGGCAAGGCTG GCCCGGTCGGCACCAGTTGCGTGAGCGGAAAGATGGCCGCTTCCCGGCCCTGCTGCAGGGAGCT CAAAATGGAGGACGCGGCGCTCGGGAGAGCGGGGGGGTGAGTCACCCACACAAAGGAAAAGGGC CTTTCCGTCCTCAGCCGTCGCTTCATGTGACTCCACGGAGTACCGGGCGCCGTCCAGGCACCTC GATTAGTTCTCGAGCTTTTGGAGTACGTCGTCTTTAGGTTGGGGGGAGGGGTTTTATGCGATGG AGTTTCCCCACACTGAGTGGGTGGAGACTGAAGTTAGGCCAGCTTGGCACTTGATGTAATTCTC CTTGGAATTTGCCCTTTTTGAGTTTGGATCTTGGTTCATTCTCAAGCCTCAGACAGTGGTTCAA AGTTTTTTTCTTCCATTTCAGGTGTCGTGA (SEQ ID NO: 627)). The lentiviral vectors had a transduction efficiency of at least 50% (FIG. 2B). The lentiviral vectors were used to transfect β2M KO cells and reconstitute β2M expression in the cells.

[0472] Surface-expression of endogenous and transfected β2M was measured using FACS analysis. The β2M KO cells transfected using the lentiviral vectors showed reduced levels of β2M surface-expression relative to wild-type T cells (FIGS. 3A-3C). In particular, surface-expression of β2M in β2M KO CD4+ T cells or CD8+ T cells expressing β2M WT under the control of the EF1a promoter was lower than that of wild-type T cells (FIGS. 3B and 3C), and surface expression of β2M in β2M KO CD4+ T cells or CD8+ T cells expressing β2M (W60G) under the control of the EF1a promoter was even lower (FIGS. 3B and 3C).

[0473] Reconstitution of β2M expression in the β2M KO cells restored surface-expression of HLA-A2 in the cells (FIGS. 4A and 4B), but at reduced levels relative to wild type cells (between about 10% and 25% of levels in the wild type cells).

[0474] Experiments were next undertaken to determine if the B2M KO cells expressing B2M (W60G) under the control of the EF1a promoter showed improved resistance to lysis by alloreactive T cells relative to B2M KO cells expressing B2M (WT) under the control of the EF1a promoter (FIGS. 5A and 5B). Cell lysis was evaluated using a T cell mixed leukocyte reaction, where the effector cells (E) were mismatched (i.e., alloreactive) T cells and the target cells (T) were the B2M KO cells expressing B2M (W60G) or B2M (WT) to reconstitute B2M expression. Cell lysis was measured after 48 hours of co-culture. Cells were co-cultured at effector cell (E) to target cell (T) ratios of 0, 0.30625, 0.6125, 1.25, 2.5, 5, 10, and 20. It was determined that B2M KO T cells expressing B2M (W60G) were less susceptible to lysis by alloreactive T cells than B2M KO T cells expressing B2M (WT). Therefore, the B2M (W60G) polypeptides protected the B2M KO T cells from alloreactive T cell lysis.

### Example 2: Expression of HLA Class-I Single Chain Dimer Variants Protected Allogeneic Immune Cells from Lysis by Alloreactive T Cells and Natural Killer (NK) Cells

[0475] Another approach to avoid activation of a subject's alloreactive T cells by allogeneic immune cells administered to the subject is through the interruption of interactions between mismatched HLA class-I polypeptides expressed on the surface of the allogeneic immune cells and T cell receptor complexes expressed on the surface of the alloreactive T cells (FIGS. 6 and 7C). In particular, activation of the alloreactive T cells can be reduced by modifying the allogeneic immune cells to express HLA class-I polypeptides with reduced affinity for CD8 polypeptides expressed on the surface of the allogeneic immune cells. For example, affinity of a beta-2-microglobulin (B2M) polypeptide for interaction with CD8 can be reduced by introducing a K58E alteration to the B2M polypeptide (FIG. 6), and affinity of an HLA-A, -B, or -C polypeptide for interactions with CD8 can be reduced by introducing a D227K, T228A, and/or A245V alteration to the HLA-A, -B, or -C polypeptide, respectively (FIG. 7C). Therefore, experiments were undertaken to improve resistance of allogeneic immune cells to lysis by alloreactive T cells by modifying the allogeneic immune cells to express HLA class-I polypeptides containing one or more of these alterations. Throughout the present Example, the allogeneic T cells were isolated from a leukopak blood collection from a de-identified healthy human donor.

[0476] As a first step in preparing the modified allogeneic immune cells with improved resistance to lysis by alloreactive T cells, HLA class-I single-chain dimers (FIG. 7A) and HLA class-I single-chain trimers (FIG. 7B) were designed. Amino acid and nucleotide sequences for the HLA class-I single chain dimers and trimers are provided in Tables 8A and 8B below, respectively. The HLA class-I single chain dimers contained, from N-terminus to C-terminus, a signal peptide, a B2M domain, a linker, and an HLA class-I heavy chain domain (HLA-X, where HLA-X represents a polypeptide derived from HLA-A, -B, or -C). The HLA class-I single chain trimers contained, from N-terminus to C-terminus, a signal peptide, a cognate peptide, a linker, a B2M domain, a linker, an HLA class-I heavy chain domain (HLA-X, where HLA-X represents a polypeptide derived from HLA-A, -B, or -C). Some of the HLA class-I heavy chain domains contained alterations (e.g., D227K, T228A, and/or A245V) that reduced or abrogated CD8 binding.

TABLE 8A
Amino acid sequences for HLA class-I single-chain dimers and trimers.1

| Description | | | | |
|---|---|---|---|---|
| of | | | SEQ | |
| polypeptide | ID# | Amino Acid Seq | ID NO | Format |
| B2M/HLA- | 230 | MSRSVALAVLALLSLSGLEAIQRTPKIQVYSRHPAENGK | 454 | single |
| A*02 | | SNFLNCYVSGFHPSDIEVDLLKNGERIEKVEHSDLSFSK | | chain |
| | | DWSFYLLYYTEFTPTEKDEYACRVNHVTLSQPKIVKWDR | | dimer |
| | | DMGGGGSGGGGSGGGGSGGGGSGSHSMRYFFTSVSRPGR | | |
| | | GEPRFIAVGYVDDTQFVRFDSDAASQRMEPRAPWIEQEG | | |
| | | PEYWDGETRKVKAHSQTHRVDLGTLRGYYNQSEAGSHTV | | |
| | | QRMYGCDVGSDWRFLRGYHQYAYDGKDYIALKEDLRSWT | | |
| | | AADMAAQTTKHKWEAAHVAEQLRAYLEGTCVEWLRRYLE | | |
| | | NGKETLQRTDAPKTHMTHHAVSDHEATLRCWALSFYPAE | | |
| | | ITLTWQRDGEDQTQDTELVETRPAGDGTFQKWAAVVVPS | | |
| | | GQEQRYTCHVQHEGLPKPLTLRWEPSSQPTIPIVGIIAG | | |
| | | LVLFGAVITGAVVAAVMWRRKSSDRKGGSYSQAASSDSA | | |
| | | QGSDVSLTACKV | | |
| B2M/HLA- | 231 | MSRSVALAVLALLSLSGLEAIQRTPKIQVYSRHPAENGK | 455 | single |
| A*02 | | SNFLNCYVSGFHPSDIEVDLLKNGERIEKVEHSDLSFSK | | chain |
| (D227K/T2 | | DWSFYLLYYTEFTPTEKDEYACRVNHVTLSQPKIVKWDR | | dimer |
| 28A) | | DMGGGGSGGGGSGGGGSGGGGSGSHSMRYFFTSVSRPGR | | |
| | | GEPRFIAVGYVDDTQFVRFDSDAASQRMEPRAPWIEQEG | | |
| | | PEYWDGETRKVKAHSQTHRVDLGTLRGYYNQSEAGSHTV | | |
| | | QRMYGCDVGSDWRFLRGYHQYAYDGKDYIALKEDLRSWT | | |
| | | AADMAAQTTKHKWEAAHVAEQLRAYLEGTCVEWLRRYLE | | |
| | | NGKETLQRTDAPKTHMTHHAVSDHEATLRCWALSFYPAE | | |
| | | ITLTWQRDGEDQTQKAELVETRPAGDGTFQKWAAVVVPS | | |
| | | GQEQRYTCHVQHEGLPKPLTLRWEPSSQPTIPIVGIIAG | | |
| | | LVLFGAVITGAVVAAVMWRRKSSDRKGGSYSQAASSDSA | | |
| | | QGSDVSLTACKV | | |
| B2M/HLA- | 232 | MSRSVALAVLALLSLSGLEAIQRTPKIQVYSRHPAENGK | 456 | single |
| A*02 | | SNFLNCYVSGFHPSDIEVDLLKNGERIEKVEHSDLSFSK | | chain |
| (A245V) | | DWSFYLLYYTEFTPTEKDEYACRVNHVTLSQPKIVKWDR | | dimer |
| | | DMGGGGSGGGGSGGGGSGGGGSGSHSMRYFFTSVSRPGR | | |
| | | GEPRFIAVGYVDDTQFVRFDSDAASQRMEPRAPWIEQEG | | |
| | | PEYWDGETRKVKAHSQTHRVDLGTLRGYYNQSEAGSHTV | | |
| | | QRMYGCDVGSDWRFLRGYHQYAYDGKDYIALKEDLRSWT | | |
| | | AADMAAQTTKHKWEAAHVAEQLRAYLEGTCVEWLRRYLE | | |
| | | NGKETLQRTDAPKTHMTHHAVSDHEATLRCWALSFYPAE | | |
| | | ITLTWQRDGEDQTQDTELVETRPAGDGTFQKWVAVVVPS | | |
| | | GQEQRYTCHVQHEGLPKPLTLRWEPSSQPTIPIVGIIAG | | |
| | | LVLFGAVITGAVVAAVMWRRKSSDRKGGSYSQAASSDSA | | |
| | | QGSDVSLTACKV | | |
| B2M/HLA- | 233 | MSRSVALAVLALLSLSGLEAIQRTPKIQVYSRHPAENGK | 457 | single |
| A*02 | | SNFLNCYVSGFHPSDIEVDLLKNGERIEKVEHSDLSFSK | | chain |
| (D227K/ | | DWSFYLLYYTEFTPTEKDEYACRVNHVTLSQPKIVKWDR | | dimer |
| T228A/A245V) | | DMGGGGSGGGGSGGGGSGGGGSGSHSMRYFFTSVSRPGR | | |
| | | GEPRFIAVGYVDDTQFVRFDSDAASQRMEPRAPWIEQEG | | |
| | | PEYWDGETRKVKAHSQTHRVDLGTLRGYYNQSEAGSHTV | | |
| | | QRMYGCDVGSDWRFLRGYHQYAYDGKDYIALKEDLRSWT | | |
| | | AADMAAQTTKHKWEAAHVAEQLRAYLEGTCVEWLRRYLE | | |
| | | NGKETLQRTDAPKTHMTHHAVSDHEATLRCWALSFYPAE | | |
| | | ITLTWQRDGEDQTQKAELVETRPAGDGTFQKWVAVVVPS | | |
| | | GQEQRYTCHVQHEGLPKPLTLRWEPSSQPTIPIVGIIAG | | |
| | | LVLFGAVITGAVVAAVMWRRKSSDRKGGSYSQAASSDSA | | |
| | | QGSDVSLTACKV | | |
| B2M(K58E)/ | 234 | MSRSVALAVLALLSLSGLEAIQRTPKIQVYSRHPAENGK | 458 | single |
| HLA-A*02 | | SNFLNCYVSGFHPSDIEVDLLKNGERIEKVEHSDLSFSE | | chain |
| | | DWSFYLLYYTEFTPTEKDEYACRVNHVTLSQPKIVKWDR | | dimer |
| | | DMGGGGSGGGGSGGGGSGGGGSGSHSMRYFFTSVSRPGR | | |
| | | GEPRFIAVGYVDDTQFVRFDSDAASQRMEPRAPWIEQEG | | |
| | | PEYWDGETRKVKAHSQTHRVDLGTLRGYYNQSEAGSHTV | | |
| | | QRMYGCDVGSDWRFLRGYHQYAYDGKDYIALKEDLRSWT | | |
| | | AADMAAQTTKHKWEAAHVAEQLRAYLEGTCVEWLRRYLE | | |
| | | NGKETLQRTDAPKTHMTHHAVSDHEATLRCWALSFYPAE | | |
| | | ITLTWQRDGEDQTQDTELVETRPAGDGTFQKWAAVVVPS | | |
| | | GQEQRYTCHVQHEGLPKPLTLRWEPSSQPTIPIVGIIAG | | |
| | | LVLFGAVITGAVVAAVMWRRKSSDRKGGSYSQAASSDSA | | |
| | | QGSDVSLTACKV | | |
| B2M(K58E)/ | 235 | MSRSVALAVLALLSLSGLEAIQRTPKIQVYSRHPAENGK | 459 | single |
| HLA- | | SNFLNCYVSGFHPSDIEVDLLKNGERIEKVEHSDLSFSE | | chain |
| A*02 | | DWSFYLLYYTEFTPTEKDEYACRVNHVTLSQPKIVKWDR | | dimer |
| (D227K/T228A) | | DMGGGGSGGGGSGGGGSGGGGSGSHSMRYFFTSVSRPGR | | |
| | | GEPRFIAVGYVDDTQFVRFDSDAASQRMEPRAPWIEQEG | | |
| | | PEYWDGETRKVKAHSQTHRVDLGTLRGYYNQSEAGSHTV | | |
| | | QRMYGCDVGSDWRFLRGYHQYAYDGKDYIALKEDLRSWT | | |
| | | AADMAAQTTKHKWEAAHVAEQLRAYLEGTCVEWLRRYLE | | |
| | | NGKETLQRTDAPKTHMTHHAVSDHEATLRCWALSFYPAE | | |
| | | ITLTWQRDGEDQTQKAELVETRPAGDGTFQKWAAVVVPS | | |
| | | GQEQRYTCHVQHEGLPKPLTLRWEPSSQPTIPIVGIIAG | | |
| | | LVLFGAVITGAVVAAVMWRRKSSDRKGGSYSQAASSDSA | | |
| | | QGSDVSLTACKV | | |
| B2M(K58E)/ | 236 | MSRSVALAVLALLSLSGLEAIQRTPKIQVYSRHPAENGK | 460 | single |
| HLA- | | SNFLNCYVSGFHPSDIEVDLLKNGERIEKVEHSDLSFSE | | chain |
| A*02(A245V) | | DWSFYLLYYTEFTPTEKDEYACRVNHVTLSQPKIVKWDR | | dimer |
| | | DMGGGGSGGGGSGGGGSGGGGSGSHSMRYFFTSVSRPGR | | |
| | | GEPRFIAVGYVDDTQFVRFDSDAASQRMEPRAPWIEQEG | | |
| | | PEYWDGETRKVKAHSQTHRVDLGTLRGYYNQSEAGSHTV | | |
| | | QRMYGCDVGSDWRFLRGYHQYAYDGKDYIALKEDLRSWT | | |
| | | AADMAAQTTKHKWEAAHVAEQLRAYLEGTCVEWLRRYLE | | |
| | | NGKETLQRTDAPKTHMTHHAVSDHEATLRCWALSFYPAE | | |
| | | ITLTWQRDGEDQTQDTELVETRPAGDGTFQKWVAVVVPS | | |
| | | GQEQRYTCHVQHEGLPKPLTLRWEPSSQPTIPIVGIIAG | | |
| | | LVLFGAVITGAVVAAVMWRRKSSDRKGGSYSQAASSDSA | | |
| | | QGSDVSLTACKV | | |
| B2M(K58E)/ | 237 | MSRSVALAVLALLSLSGLEAIQRTPKIQVYSRHPAENGK | 461 | single |
| HLA- | | SNFLNCYVSGFHPSDIEVDLLKNGERIEKVEHSDLSFSE | | chain |
| A*02(D227K/ | | DWSFYLLYYTEFTPTEKDEYACRVNHVTLSQPKIVKWDR | | dimer |
| T228A/A245V) | | DMGGGGSGGGGSGGGGSGGGGSGSHSMRYFFTSVSRPGR | | |
| | | GEPRFIAVGYVDDTQFVRFDSDAASQRMEPRAPWIEQEG | | |
| | | PEYWDGETRKVKAHSQTHRVDLGTLRGYYNQSEAGSHTV | | |
| | | QRMYGCDVGSDWRFLRGYHQYAYDGKDYIALKEDLRSWT | | |
| | | AADMAAQTTKHKWEAAHVAEQLRAYLEGTCVEWLRRYLE | | |
| | | NGKETLQRTDAPKTHMTHHAVSDHEATLRCWALSFYPAE | | |
| | | ITLTWQRDGEDQTQKAELVETRPAGDGTFQKWVAVVVPS | | |
| | | GQEQRYTCHVQHEGLPKPLTLRWEPSSQPTIPIVGIIAG | | |
| | | LVLFGAVITGAVVAAVMWRRKSSDRKGGSYSQAASSDSA | | |
| | | QGSDVSLTACKV | | |
| B2M/HLA- | 238 | MSRSVALAVLALLSLSGLEAIQRTPKIQVYSRHPAENGK | 462 | single |
| A*02- | | SNFLNCYVSGFHPSDIEVDLLKNGERIEKVEHSDLSFSK | | chain |
| CD4TM | | DWSFYLLYYTEFTPTEKDEYACRVNHVTLSQPKIVKWDR | | dimer |
| | | DMGGGGSGGGGSGGGGSGGGGSGSHSMRYFFTSVSRPGR | | |
| | | GEPRFIAVGYVDDTQFVRFDSDAASQRMEPRAPWIEQEG | | |
| | | PEYWDGETRKVKAHSQTHRVDLGTLRGYYNQSEAGSHTV | | |
| | | QRMYGCDVGSDWRFLRGYHQYAYDGKDYIALKEDLRSWT | | |
| | | AADMAAQTTKHKWEAAHVAEQLRAYLEGTCVEWLRRYLE | | |
| | | NGKETLQRTDAPKTHMTHHAVSDHEATLRCWALSFYPAE | | |
| | | ITLTWQRDGEDQTQDTELVETRPAGDGTFQKWAAVVVPS | | |
| | | GQEQRYTCHVQHEGLPKPLTLRWEPSSQPTIPIMALIVL | | |
| | | GGVAGLLLFIGLGIFFCVRC | | |
| B2M/HLA- | 239 | MSRSVALAVLALLSLSGLEAIQRTPKIQVYSRHPAENGK | 463 | single |
| A*02(D227K/ | | SNFLNCYVSGFHPSDIEVDLLKNGERIEKVEHSDLSFSK | | chain |
| T228A)- | | DWSFYLLYYTEFTPTEKDEYACRVNHVTLSQPKIVKWDR | | dimer |
| CD4TM | | DMGGGGSGGGGSGGGGSGGGGSGSHSMRYFFTSVSRPGR | | |
| | | GEPRFIAVGYVDDTQFVRFDSDAASQRMEPRAPWIEQEG | | |
| | | PEYWDGETRKVKAHSQTHRVDLGTLRGYYNQSEAGSHTV | | |
| | | QRMYGCDVGSDWRFLRGYHQYAYDGKDYIALKEDLRSWT | | |
| | | AADMAAQTTKHKWEAAHVAEQLRAYLEGTCVEWLRRYLE | | |
| | | NGKETLQRTDAPKTHMTHHAVSDHEATLRCWALSFYPAE | | |
| | | ITLTWQRDGEDQTQKAELVETRPAGDGTFQKWAAVVVPS | | |
| | | GQEQRYTCHVQHEGLPKPLTLRWEPSSQPTIPIMALIVL | | |
| | | GGVAGLLLFIGLGIFFCVRC | | |
| B2M/HLA- | 240 | MSRSVALAVLALLSLSGLEAIQRTPKIQVYSRHPAENGK | 464 | single |
| A*02(A245V)- | | SNFLNCYVSGFHPSDIEVDLLKNGERIEKVEHSDLSFSK | | chain |
| CD4TM | | DWSFYLLYYTEFTPTEKDEYACRVNHVTLSQPKIVKWDR | | dimer |
| | | DMGGGGSGGGGSGGGGSGGGGSGSHSMRYFFTSVSRPGR | | |
| | | GEPRFIAVGYVDDTQFVRFDSDAASQRMEPRAPWIEQEG | | |
| | | PEYWDGETRKVKAHSQTHRVDLGTLRGYYNQSEAGSHTV | | |
| | | QRMYGCDVGSDWRFLRGYHQYAYDGKDYIALKEDLRSWT | | |
| | | AADMAAQTTKHKWEAAHVAEQLRAYLEGTCVEWLRRYLE | | |
| | | NGKETLQRTDAPKTHMTHHAVSDHEATLRCWALSFYPAE | | |
| | | ITLTWQRDGEDQTQDTELVETRPAGDGTFQKWVAVVVPS | | |
| | | GQEQRYTCHVQHEGLPKPLTLRWEPSSQPTIPIMALIVL | | |
| | | GGVAGLLLFIGLGIFFCVRC | | |
| B2M/HLA- | 241 | MSRSVALAVLALLSLSGLEAIQRTPKIQVYSRHPAENGK | 465 | single |
| A*02(D227K/ | | SNFLNCYVSGFHPSDIEVDLLKNGERIEKVEHSDLSFSK | | chain |
| T228A/A245V)- | | DWSFYLLYYTEFTPTEKDEYACRVNHVTLSQPKIVKWDR | | dimer |
| CD4TM | | DMGGGGSGGGGSGGGGSGGGGSGSHSMRYFFTSVSRPGR | | |
| | | GEPRFIAVGYVDDTQFVRFDSDAASQRMEPRAPWIEQEG | | |
| | | PEYWDGETRKVKAHSQTHRVDLGTLRGYYNQSEAGSHTV | | |
| | | QRMYGCDVGSDWRFLRGYHQYAYDGKDYIALKEDLRSWT | | |
| | | AADMAAQTTKHKWEAAHVAEQLRAYLEGTCVEWLRRYLE | | |
| | | NGKETLQRTDAPKTHMTHHAVSDHEATLRCWALSFYPAE | | |
| | | ITLTWQRDGEDQTQKAELVETRPAGDGTFQKWVAVVVPS | | |
| | | GQEQRYTCHVQHEGLPKPLTLRWEPSSQPTIPIMALIVL | | |
| | | GGVAGLLLFIGLGIFFCVRC | | |
| B2M(K58E)/ | 242 | MSRSVALAVLALLSLSGLEAIQRTPKIQVYSRHPAENGK | 466 | single |
| HLA-A*02- | | SNFLNCYVSGFHPSDIEVDLLKNGERIEKVEHSDLSFSE | | chain |
| CD4TM | | DWSFYLLYYTEFTPTEKDEYACRVNHVTLSQPKIVKWDR | | dimer |
| | | DMGGGGSGGGGSGGGGSGGGGSGSHSMRYFFTSVSRPGR | | |
| | | GEPRFIAVGYVDDTQFVRFDSDAASQRMEPRAPWIEQEG | | |
| | | PEYWDGETRKVKAHSQTHRVDLGTLRGYYNQSEAGSHTV | | |
| | | QRMYGCDVGSDWRFLRGYHQYAYDGKDYIALKEDLRSWT | | |
| | | AADMAAQTTKHKWEAAHVAEQLRAYLEGTCVEWLRRYLE | | |
| | | NGKETLQRTDAPKTHMTHHAVSDHEATLRCWALSFYPAE | | |
| | | ITLTWQRDGEDQTQDTELVETRPAGDGTFQKWAAVVVPS | | |
| | | GQEQRYTCHVQHEGLPKPLTLRWEPSSQPTIPIMALIVL | | |
| | | GGVAGLLLFIGLGIFFCVRC | | |
| B2M(K58E)/ | 243 | MSRSVALAVLALLSLSGLEAIQRTPKIQVYSRHPAENGK | 467 | single |
| HLA- | | SNFLNCYVSGFHPSDIEVDLLKNGERIEKVEHSDLSFSE | | chain |
| A*02(D227K/ | | DWSFYLLYYTEFTPTEKDEYACRVNHVTLSQPKIVKWDR | | dimer |
| T228A)- | | DMGGGGSGGGGSGGGGSGGGGSGSHSMRYFFTSVSRPGR | | |
| CD4TM | | GEPRFIAVGYVDDTQFVRFDSDAASQRMEPRAPWIEQEG | | |
| | | PEYWDGETRKVKAHSQTHRVDLGTLRGYYNQSEAGSHTV | | |
| | | QRMYGCDVGSDWRFLRGYHQYAYDGKDYIALKEDLRSWT | | |
| | | AADMAAQTTKHKWEAAHVAEQLRAYLEGTCVEWLRRYLE | | |
| | | NGKETLQRTDAPKTHMTHHAVSDHEATLRCWALSFYPAE | | |
| | | ITLTWQRDGEDQTQKAELVETRPAGDGTFQKWAAVVVPS | | |
| | | GQEQRYTCHVQHEGLPKPLTLRWEPSSQPTIPIMALIVL | | |
| | | GGVAGLLLFIGLGIFFCVRC | | |
| B2M(K58E)/ | 244 | MSRSVALAVLALLSLSGLEAIQRTPKIQVYSRHPAENGK | 468 | single |
| HLA- | | SNFLNCYVSGFHPSDIEVDLLKNGERIEKVEHSDLSFSE | | chain |
| A*02(A245V)- | | DWSFYLLYYTEFTPTEKDEYACRVNHVTLSQPKIVKWDR | | dimer |
| CD4TM | | DMGGGGSGGGGSGGGGSGGGGSGSHSMRYFFTSVSRPGR | | |
| | | GEPRFIAVGYVDDTQFVRFDSDAASQRMEPRAPWIEQEG | | |
| | | PEYWDGETRKVKAHSQTHRVDLGTLRGYYNQSEAGSHTV | | |
| | | QRMYGCDVGSDWRFLRGYHQYAYDGKDYIALKEDLRSWT | | |
| | | AADMAAQTTKHKWEAAHVAEQLRAYLEGTCVEWLRRYLE | | |
| | | NGKETLQRTDAPKTHMTHHAVSDHEATLRCWALSFYPAE | | |
| | | ITLTWQRDGEDQTQDTELVETRPAGDGTFQKWVAVVVPS | | |
| | | GQEQRYTCHVQHEGLPKPLTLRWEPSSQPTIPIMALIVL | | |
| | | GGVAGLLLFIGLGIFFCVRC | | |
| B2M(K58E)/ | 245 | MSRSVALAVLALLSLSGLEAIQRTPKIQVYSRHPAENGK | 469 | single |
| HLA- | | SNFLNCYVSGFHPSDIEVDLLKNGERIEKVEHSDLSFSE | | chain |
| A*02(D227K/ | | DWSFYLLYYTEFTPTEKDEYACRVNHVTLSQPKIVKWDR | | dimer |
| T228A/A245V)- | | DMGGGGSGGGGSGGGGSGGGGSGSHSMRYFFTSVSRPGR | | |
| CD4TM | | GEPRFIAVGYVDDTQFVRFDSDAASQRMEPRAPWIEQEG | | |
| | | PEYWDGETRKVKAHSQTHRVDLGTLRGYYNQSEAGSHTV | | |
| | | QRMYGCDVGSDWRFLRGYHQYAYDGKDYIALKEDLRSWT | | |
| | | AADMAAQTTKHKWEAAHVAEQLRAYLEGTCVEWLRRYLE | | |
| | | NGKETLQRTDAPKTHMTHHAVSDHEATLRCWALSFYPAE | | |
| | | ITLTWQRDGEDQTQKAELVETRPAGDGTFQKWVAVVVPS | | |
| | | GQEQRYTCHVQHEGLPKPLTLRWEPSSQPTIPIMALIVL | | |
| | | GGVAGLLLFIGLGIFFCVRC | | |
| B2M/HLA- | 246 | MSRSVALAVLALLSLSGLEAIQRTPKIQVYSRHPAENGK | 470 | single |
| C*05(C1G) | | SNFLNCYVSGFHPSDIEVDLLKNGERIEKVEHSDLSFSK | | chain |
| | | DWSFYLLYYTEFTPTEKDEYACRVNHVTLSQPKIVKWDR | | dimer |
| | | DMGGGGSGGGGSGGGGSGGGGSGSHSMRYFYTAVSRPGR | | |
| | | GEPRFIAVGYVDDTQFVQFDSDAASPRGEPRAPWVEQEG | | |
| | | PEYWDRETQKYKRQAQTDRVNLRKLRGYYNQSEAGSHTL | | |
| | | QRMYGCDLGPDGRLLRGYNQFAYDGKDYIALNEDLRSWT | | |
| | | AADKAAQITQRKWEAAREAEQRRAYLEGTCVEWLRRYLE | | |
| | | NGKKTLQRAEHPKTHVTHHPVSDHEATLRCWALGFYPAE | | |
| | | ITLTWQRDGEDQTQDTELVETRPAGDGTFQKWAAVVVPS | | |
| | | GEEQRYTCHVQHEGLPEPLTLRWGPSSQPTIPIVGIVAG | | |
| | | LAVLAVLAVLGAVMAVVMCRRKSSGGKGGSCSQAASSNS | | |
| | | AQGSDESLIACKA | | |
| B2M/HLA- | 247 | MSRSVALAVLALLSLSGLEAIQRTPKIQVYSRHPAENGK | 471 | single |
| C*05(C1G)- | | SNFLNCYVSGFHPSDIEVDLLKNGERIEKVEHSDLSFSK | | chain |
| CD4TM | | DWSFYLLYYTEFTPTEKDEYACRVNHVTLSQPKIVKWDR | | dimer |
| | | DMGGGGSGGGGSGGGGSGGGGSGSHSMRYFYTAVSRPGR | | |
| | | GEPRFIAVGYVDDTQFVQFDSDAASPRGEPRAPWVEQEG | | |
| | | PEYWDRETQKYKRQAQTDRVNLRKLRGYYNQSEAGSHTL | | |
| | | QRMYGCDLGPDGRLLRGYNQFAYDGKDYIALNEDLRSWT | | |
| | | AADKAAQITQRKWEAAREAEQRRAYLEGTCVEWLRRYLE | | |
| | | NGKKTLQRAEHPKTHVTHHPVSDHEATLRCWALGFYPAE | | |
| | | ITLTWQRDGEDQTQDTELVETRPAGDGTFQKWAAVVVPS | | |
| | | GEEQRYTCHVQHEGLPEPLTLRWGPSSQPTIPIMALIVL | | |
| | | GGVAGLLLFIGLGIFFCVRC | | |
| B2M/HLA- | 248 | MSRSVALAVLALLSLSGLEAIQRTPKIQVYSRHPAENGK | 472 | single |
| C*04 | | SNFLNCYVSGFHPSDIEVDLLKNGERIEKVEHSDLSFSK | | chain |
| | | DWSFYLLYYTEFTPTEKDEYACRVNHVTLSQPKIVKWDR | | dimer |
| | | DMGGGGSGGGGSGGGGSGGGGSGSHSMRYFSTSVSWPGR | | |
| | | GEPRFIAVGYVDDTQFVRFDSDAASPRGEPREPWVEQEG | | |
| | | PEYWDRETQKYKRQAQADRVNLRKLRGYYNQSEDGSHTL | | |
| | | QRMFGCDLGPDGRLLRGYNQFAYDGKDYIALNEDLRSWT | | |
| | | AADTAAQITQRKWEAAREAEQRRAYLEGTCVEWLRRYLE | | |
| | | NGKETLQRAEHPKTHVTHHPVSDHEATLRCWALGFYPAE | | |
| | | ITLTWQWDGEDQTQDTELVETRPAGDGTFQKWAAVVVPS | | |
| | | GEEQRYTCHVQHEGLPEPLTLRWKPSSQPTIPIVGIVAG | | |
| | | LAVLAVLAVLGAMVAVVMCRRKSSGGKGGSCSQAASSNS | | |
| | | AQGSDESLIACKA | | |
| B2M/HLA- | 249 | MSRSVALAVLALLSLSGLEAIQRTPKIQVYSRHPAENGK | 473 | single |
| C*04- | | SNFLNCYVSGFHPSDIEVDLLKNGERIEKVEHSDLSFSK | | chain |
| CD4TM | | DWSFYLLYYTEFTPTEKDEYACRVNHVTLSQPKIVKWDR | | dimer |
| | | DMGGGGSGGGGSGGGGSGGGGSGSHSMRYFSTSVSWPGR | | |
| | | GEPRFIAVGYVDDTQFVRFDSDAASPRGEPREPWVEQEG | | |
| | | PEYWDRETQKYKRQAQADRVNLRKLRGYYNQSEDGSHTL | | |
| | | QRMFGCDLGPDGRLLRGYNQFAYDGKDYIALNEDLRSWT | | |
| | | AADTAAQITQRKWEAAREAEQRRAYLEGTCVEWLRRYLE | | |
| | | NGKETLQRAEHPKTHVTHHPVSDHEATLRCWALGFYPAE | | |
| | | ITLTWQWDGEDQTQDTELVETRPAGDGTFQKWAAVVVPS | | |
| | | GEEQRYTCHVQHEGLPEPLTLRWKPSSQPTIPIMALIVL | | |
| | | GGVAGLLLFIGLGIFF | | |
| cPep/B2M/ | 250 | MSRSVALAVLALLSLSGLEAQYDDAVYKLGGGGSGGGGS | 474 | single |
| HLA-C*04 | | GGGGSIQRTPKIQVYSRHPAENGKSNFLNCYVSGFHPSD | | chain |
| | | IEVDLLKNGERIEKVEHSDLSFSKDWSFYLLYYTEFTPT | | trimer |
| | | EKDEYACRVNHVTLSQPKIVKWDRDMGGGGSGGGGSGGG | | |
| | | GSGGGGSGSHSMRYFSTSVSWPGRGEPRFIAVGYVDDTQ | | |
| | | FVRFDSDAASPRGEPREPWVEQEGPEYWDRETQKYKRQA | | |
| | | QADRVNLRKLRGYYNQSEDGSHTLQRMFGCDLGPDGRLL | | |
| | | RGYNQFAYDGKDYIALNEDLRSWTAADTAAQITQRKWEA | | |
| | | AREAEQRRAYLEGTCVEWLRRYLENGKETLQRAEHPKTH | | |
| | | VTHHPVSDHEATLRCWALGFYPAEITLTWQWDGEDQTQD | | |
| | | TELVETRPAGDGTFQKWAAVVVPSGEEQRYTCHVQHEGL | | |
| | | PEPLTLRWKPSSQPTIPIVGIVAGLAVLAVLAVLGAMVA | | |
| | | VVMCRRKSSGGKGGSCSQAASSNSAQGSDESLIACKA | | |
| cPep/B2M/ | 251 | MSRSVALAVLALLSLSGLEAQYDDAVYKLGGGGSGGGGS | 475 | single |
| HLA-C*04- | | GGGGSIQRTPKIQVYSRHPAENGKSNFLNCYVSGFHPSD | | chain |
| CD4TM | | IEVDLLKNGERIEKVEHSDLSFSKDWSFYLLYYTEFTPT | | trimer |
| | | EKDEYACRVNHVTLSQPKIVKWDRDMGGGGSGGGGSGGG | | |
| | | GSGGGGSGSHSMRYFSTSVSWPGRGEPRFIAVGYVDDTQ | | |
| | | FVRFDSDAASPRGEPREPWVEQEGPEYWDRETQKYKRQA | | |
| | | QADRVNLRKLRGYYNQSEDGSHTLQRMFGCDLGPDGRLL | | |
| | | RGYNQFAYDGKDYIALNEDLRSWTAADTAAQITQRKWEA | | |
| | | AREAEQRRAYLEGTCVEWLRRYLENGKETLQRAEHPKTH | | |
| | | VTHHPVSDHEATLRCWALGFYPAEITLTWQWDGEDQTQD | | |
| | | TELVETRPAGDGTFQKWAAVVVPSGEEQRYTCHVQHEGL | | |
| | | PEPLTLRWKPSSQPTIPIMALIVLGGVAGLLLFIGLGIF | | |
| | | FCVRC | | |
| B2M/HLA- | 252 | MSRSVALAVLALLSLSGLEAIQRTPKIQVYSRHPAENGK | 476 | single |
| C*07(C1G) | | SNFLNCYVSGFHPSDIEVDLLKNGERIEKVEHSDLSFSK | | chain |
| | | DWSFYLLYYTEFTPTEKDEYACRVNHVTLSQPKIVKWDR | | dimer |
| | | DMGGGGSGGGGSGGGGSGGGGSGSHSMRYFDTAVSRPGR | | |
| | | GEPRFISVGYVDDTQFVRFDSDAASPRGEPRAPWVEQEG | | |
| | | PEYWDRETQKYKRQAQADRVSLRNLRGYYNQSEDGSHTL | | |
| | | QRMSGCDLGPDGRLLRGYDQSAYDGKDYIALNEDLRSWT | | |
| | | AADTAAQITQRKLEAARAAEQLRAYLEGTCVEWLRRYLE | | |
| | | NGKETLQRAEPPKTHVTHHPLSDHEATLRCWALGFYPAE | | |
| | | ITLTWQRDGEDQTQDTELVETRPAGDGTFQKWAAVVVPS | | |
| | | GQEQRYTCHMQHEGLQEPLTLSWEPSSQPTIPIMGIVAG | | |
| | | LAVLVVLAVLGAVVTAMMCRRKSSGGKGGSCSQAACSNS | | |
| | | AQGSDESLITCKA | | |
| B2M/HLA- | 253 | MSRSVALAVLALLSLSGLEAIQRTPKIQVYSRHPAENGK | 477 | single |
| C*07(C1G)- | | SNFLNCYVSGFHPSDIEVDLLKNGERIEKVEHSDLSFSK | | chain |
| CD4TM | | DWSFYLLYYTEFTPTEKDEYACRVNHVTLSQPKIVKWDR | | dimer |
| | | DMGGGGSGGGGSGGGGSGGGGSGSHSMRYFDTAVSRPGR | | |
| | | GEPRFISVGYVDDTQFVRFDSDAASPRGEPRAPWVEQEG | | |
| | | PEYWDRETQKYKRQAQADRVSLRNLRGYYNQSEDGSHTL | | |
| | | QRMSGCDLGPDGRLLRGYDQSAYDGKDYIALNEDLRSWT | | |
| | | AADTAAQITQRKLEAARAAEQLRAYLEGTCVEWLRRYLE | | |
| | | NGKETLQRAEPPKTHVTHHPLSDHEATLRCWALGFYPAE | | |
| | | ITLTWQRDGEDQTQDTELVETRPAGDGTFQKWAAVVVPS | | |
| | | GQEQRYTCHMQHEGLQEPLTLSWEPSSQPTIPIMALIVL | | |
| | | GGVAGLLLFIGLGIFFCVRC | | |
| cPep/B2M/ | 254 | MSRSVALAVLALLSLSGLEARYRPGTVALGGGGSGGGGS | 478 | single |
| HLA- | | GGGGSIQRTPKIQVYSRHPAENGKSNFLNCYVSGFHPSD | | chain |
| C*07(C1G) | | IEVDLLKNGERIEKVEHSDLSFSKDWSFYLLYYTEFTPT | | trimer |
| | | EKDEYACRVNHVTLSQPKIVKWDRDMGGGGSGGGGSGGG | | |
| | | GSGGGGSGSHSMRYFDTAVSRPGRGEPRFISVGYVDDTQ | | |
| | | FVRFDSDAASPRGEPRAPWVEQEGPEYWDRETQKYKRQA | | |
| | | QADRVSLRNLRGYYNQSEDGSHTLQRMSGCDLGPDGRLL | | |
| | | RGYDQSAYDGKDYIALNEDLRSWTAADTAAQITQRKLEA | | |
| | | ARAAEQLRAYLEGTCVEWLRRYLENGKETLQRAEPPKTH | | |
| | | VTHHPLSDHEATLRCWALGFYPAEITLTWQRDGEDQTQD | | |
| | | TELVETRPAGDGTFQKWAAVVVPSGQEQRYTCHMQHEGL | | |
| | | QEPLTLSWEPSSQPTIPIMGIVAGLAVLVVLAVLGAVVT | | |
| | | AMMCRRKSSGGKGGSCSQAACSNSAQGSDESLITCKA | | |
| cPep/B2M/ | 255 | MSRSVALAVLALLSLSGLEARYRPGTVALGGGGSGGGGS | 479 | single |
| HLA- | | GGGGSIQRTPKIQVYSRHPAENGKSNFLNCYVSGFHPSD | | chain |
| C*07(C1G)- | | IEVDLLKNGERIEKVEHSDLSFSKDWSFYLLYYTEFTPT | | trimer |
| CD4TM | | EKDEYACRVNHVTLSQPKIVKWDRDMGGGGSGGGGSGGG | | |
| | | GSGGGGSGSHSMRYFDTAVSRPGRGEPRFISVGYVDDTQ | | |
| | | FVRFDSDAASPRGEPRAPWVEQEGPEYWDRETQKYKRQA | | |
| | | QADRVSLRNLRGYYNQSEDGSHTLQRMSGCDLGPDGRLL | | |
| | | RGYDQSAYDGKDYIALNEDLRSWTAADTAAQITQRKLEA | | |
| | | ARAAEQLRAYLEGTCVEWLRRYLENGKETLQRAEPPKTH | | |
| | | VTHHPLSDHEATLRCWALGFYPAEITLTWQRDGEDQTQD | | |
| | | TELVETRPAGDGTFQKWAAVVVPSGQEQRYTCHMQHEGL | | |
| | | QEPLTLSWEPSSQPTIPIMALIVLGGVAGLLLFIGLGIF | | |
| | | FCVRC | | |
| B2M/HLA- | 256 | MSRSVALAVLALLSLSGLEAIQRTPKIQVYSRHPAENGK | 480 | single |
| B*57 | | SNFLNCYVSGFHPSDIEVDLLKNGERIEKVEHSDLSFSK | | chain |
| | | DWSFYLLYYTEFTPTEKDEYACRVNHVTLSQPKIVKWDR | | dimer |
| | | DMGGGGSGGGGSGGGGSGGGGSGSHSMRYFYTAMSRPGR | | |
| | | GEPRFIAVGYVDDTQFVRFDSDAASPRMAPRAPWIEQEG | | |
| | | PEYWDGETRNMKASAQTYRENLRIALRYYNQSEAGSHII | | |
| | | QVMYGCDVGPDGRLLRGHDQSAYDGKDYIALNEDLSSWT | | |
| | | AADTAAQITQRKWEAARVAEQLRAYLEGLCVEWLRRYLE | | |
| | | NGKETLQRADPPKTHVTHHPISDHEATLRCWALGFYPAE | | |
| | | ITLTWQRDGEDQTQDTELVETRPAGDRTFQKWAAVVVPS | | |
| | | GEEQRYTCHVQHEGLPKPLTLRWEPSSQSTVPIVGIVAG | | |
| | | LAVLAVVVIGAVVAAVMCRRKSSGGKGGSYSQAACSDSA | | |
| | | QGSDVSLTA | | |
| B2M/HLA- | 257 | MSRSVALAVLALLSLSGLEAIQRTPKIQVYSRHPAENGK | 481 | single |
| B*57- | | SNFLNCYVSGFHPSDIEVDLLKNGERIEKVEHSDLSFSK | | chain |
| CD4TM | | DWSFYLLYYTEFTPTEKDEYACRVNHVTLSQPKIVKWDR | | dimer |
| | | DMGGGGSGGGGSGGGGSGGGGSGSHSMRYFYTAMSRPGR | | |
| | | GEPRFIAVGYVDDTQFVRFDSDAASPRMAPRAPWIEQEG | | |
| | | PEYWDGETRNMKASAQTYRENLRIALRYYNQSEAGSHII | | |
| | | QVMYGCDVGPDGRLLRGHDQSAYDGKDYIALNEDLSSWT | | |
| | | AADTAAQITQRKWEAARVAEQLRAYLEGLCVEWLRRYLE | | |
| | | NGKETLQRADPPKTHVTHHPISDHEATLRCWALGFYPAE | | |
| | | ITLTWQRDGEDQTQDTELVETRPAGDRTFQKWAAVVVPS | | |
| | | GEEQRYTCHVQHEGLPKPLTLRWEPSSQSTVPIMALIVL | | |
| | | GGVAGLLLFIGLGIFFCVRC | | |
| cPep/B2M/ | 258 | MSRSVALAVLALLSLSGLEALSSPVTKSFGGGGSGGGGS | 482 | single |
| HLA-B*57 | | GGGGSIQRTPKIQVYSRHPAENGKSNFLNCYVSGFHPSD | | chain |
| | | IEVDLLKNGERIEKVEHSDLSFSKDWSFYLLYYTEFTPT | | trimer |
| | | EKDEYACRVNHVTLSQPKIVKWDRDMGGGGSGGGGSGGG | | |
| | | GSGGGGSGSHSMRYFYTAMSRPGRGEPRFIAVGYVDDTQ | | |
| | | FVRFDSDAASPRMAPRAPWIEQEGPEYWDGETRNMKASA | | |
| | | QTYRENLRIALRYYNQSEAGSHIIQVMYGCDVGPDGRLL | | |
| | | RGHDQSAYDGKDYIALNEDLSSWTAADTAAQITQRKWEA | | |
| | | ARVAEQLRAYLEGLCVEWLRRYLENGKETLQRADPPKTH | | |
| | | VTHHPISDHEATLRCWALGFYPAEITLTWQRDGEDQTQD | | |
| | | TELVETRPAGDRTFQKWAAVVVPSGEEQRYTCHVQHEGL | | |
| | | PKPLTLRWEPSSQSTVPIVGIVAGLAVLAVVVIGAVVAA | | |
| | | VMCRRKSSGGKGGSYSQAACSDSAQGSDVSLTA | | |
| cPep/B2M/ | 259 | MSRSVALAVLALLSLSGLEALSSPVTKSFGGGGSGGGGS | 483 | single |
| HLA-B*57- | | GGGGSIQRTPKIQVYSRHPAENGKSNFLNCYVSGFHPSD | | chain |
| CD4TM | | IEVDLLKNGERIEKVEHSDLSFSKDWSFYLLYYTEFTPT | | trimer |
| | | EKDEYACRVNHVTLSQPKIVKWDRDMGGGGSGGGGSGGG | | |
| | | GSGGGGSGSHSMRYFYTAMSRPGRGEPRFIAVGYVDDTQ | | |
| | | FVRFDSDAASPRMAPRAPWIEQEGPEYWDGETRNMKASA | | |
| | | QTYRENLRIALRYYNQSEAGSHIIQVMYGCDVGPDGRLL | | |
| | | RGHDQSAYDGKDYIALNEDLSSWTAADTAAQITQRKWEA | | |
| | | ARVAEQLRAYLEGLCVEWLRRYLENGKETLQRADPPKTH | | |
| | | VTHHPISDHEATLRCWALGFYPAEITLTWQRDGEDQTQD | | |
| | | TELVETRPAGDRTFQKWAAVVVPSGEEQRYTCHVQHEGL | | |
| | | PKPLTLRWEPSSQSTVPIMALIVLGGVAGLLLFIGLGIF | | |
| | | FCVRC | | |
| B2M/HLA- | 260 | MSRSVALAVLALLSLSGLEAIQRTPKIQVYSRHPAENGK | 484 | single |
| B*44 | | SNFLNCYVSGFHPSDIEVDLLKNGERIEKVEHSDLSFSK | | chain |
| | | DWSFYLLYYTEFTPTEKDEYACRVNHVTLSQPKIVKWDR | | dimer |
| | | DMGGGGSGGGGSGGGGSGGGGSGSHSMRYFYTAMSRPGR | | |
| | | GEPRFITVGYVDDTLFVRFDSDATSPRKEPRAPWIEQEG | | |
| | | PEYWDRETQISKTNTQTYRENLRTALRYYNQSEAGSHII | | |
| | | QRMYGCDVGPDGRLLRGYDQDAYDGKDYIALNEDLSSWT | | |
| | | AADTAAQITQRKWEAARVAEQDRAYLEGLCVESLRRYLE | | |
| | | NGKETLQRADPPKTHVTHHPISDHEVTLRCWALGFYPAE | | |
| | | ITLTWQRDGEDQTQDTELVETRPAGDRTFQKWAAVVVPS | | |
| | | GEEQRYTCHVQHEGLPKPLTLRWEPSSQSTVPIVGIVAG | | |
| | | LAVLAVVVIGAVVAAVMCRRKSSGGKGGSYSQAACSDSA | | |
| | | QGSDVSLTA | | |
| B2M/HLA- | 261 | MSRSVALAVLALLSLSGLEAIQRTPKIQVYSRHPAENGK | 485 | single |
| B*44- | | SNFLNCYVSGFHPSDIEVDLLKNGERIEKVEHSDLSFSK | | chain |
| CD4TM | | DWSFYLLYYTEFTPTEKDEYACRVNHVTLSQPKIVKWDR | | dimer |
| | | DMGGGGSGGGGSGGGGSGGGGSGSHSMRYFYTAMSRPGR | | |
| | | GEPRFITVGYVDDTLFVRFDSDATSPRKEPRAPWIEQEG | | |
| | | PEYWDRETQISKTNTQTYRENLRTALRYYNQSEAGSHII | | |
| | | QRMYGCDVGPDGRLLRGYDQDAYDGKDYIALNEDLSSWT | | |
| | | AADTAAQITQRKWEAARVAEQDRAYLEGLCVESLRRYLE | | |
| | | NGKETLQRADPPKTHVTHHPISDHEVTLRCWALGFYPAE | | |
| | | ITLTWQRDGEDQTQDTELVETRPAGDRTFQKWAAVVVPS | | |
| | | GEEQRYTCHVQHEGLPKPLTLRWEPSSQSTVPIMALIVL | | |
| | | GGVAGLLLFIGLGIFFCVRC | | |
| cPep/B2M/ | 262 | MSRSVALAVLALLSLSGLEAEEVHDLERKYGGGGSGGGG | 486 | single |
| HLA-B*44 | | SGGGGSIQRTPKIQVYSRHPAENGKSNFLNCYVSGFHPS | | chain |
| | | DIEVDLLKNGERIEKVEHSDLSFSKDWSFYLLYYTEFTP | | trimer |
| | | TEKDEYACRVNHVTLSQPKIVKWDRDMGGGGSGGGGSGG | | |
| | | GGSGGGGSGSHSMRYFYTAMSRPGRGEPRFITVGYVDDT | | |
| | | LFVRFDSDATSPRKEPRAPWIEQEGPEYWDRETQISKTN | | |
| | | TQTYRENLRTALRYYNQSEAGSHIIQRMYGCDVGPDGRL | | |
| | | LRGYDQDAYDGKDYIALNEDLSSWTAADTAAQITQRKWE | | |
| | | AARVAEQDRAYLEGLCVESLRRYLENGKETLQRADPPKT | | |
| | | HVTHHPISDHEVTLRCWALGFYPAEITLTWQRDGEDQTQ | | |
| | | DTELVETRPAGDRTFQKWAAVVVPSGEEQRYTCHVQHEG | | |
| | | LPKPLTLRWEPSSQSTVPIVGIVAGLAVLAVVVIGAVVA | | |
| | | AVMCRRKSSGGKGGSYSQAACSDSAQGSDVSLTA | | |
| cPep/B2M/ | 263 | MSRSVALAVLALLSLSGLEAEEVHDLERKYGGGGSGGGG | 487 | single |
| HLA-B*44- | | SGGGGSIQRTPKIQVYSRHPAENGKSNFLNCYVSGFHPS | | chain |
| CD4TM | | DIEVDLLKNGERIEKVEHSDLSFSKDWSFYLLYYTEFTP | | trimer |
| | | TEKDEYACRVNHVTLSQPKIVKWDRDMGGGGSGGGGSGG | | |
| | | GGSGGGGSGSHSMRYFYTAMSRPGRGEPRFITVGYVDDT | | |
| | | LFVRFDSDATSPRKEPRAPWIEQEGPEYWDRETQISKTN | | |
| | | TQTYRENLRTALRYYNQSEAGSHIIQRMYGCDVGPDGRL | | |
| | | LRGYDQDAYDGKDYIALNEDLSSWTAADTAAQITQRKWE | | |
| | | AARVAEQDRAYLEGLCVESLRRYLENGKETLQRADPPKT | | |
| | | HVTHHPISDHEVTLRCWALGFYPAEITLTWQRDGEDQTQ | | |
| | | DTELVETRPAGDRTFQKWAAVVVPSGEEQRYTCHVQHEG | | |
| | | LPKPLTLRWEPSSQSTVPIMALIVLGGVAGLLLFIGLGI | | |
| | | FFCVRC | | |
| B2M/HLA- | 264 | MSRSVALAVLALLSLSGLEAIQRTPKIQVYSRHPAENGK | 488 | single |
| A*03 | | SNFLNCYVSGFHPSDIEVDLLKNGERIEKVEHSDLSFSK | | chain |
| | | DWSFYLLYYTEFTPTEKDEYACRVNHVTLSQPKIVKWDR | | dimer |
| | | DMGGGGSGGGGSGGGGSGGGGSGSHSMRYFFTSVSRPGR | | |
| | | GEPRFIAVGYVDDTQFVRFDSDAASQRMEPRAPWIEQEG | | |
| | | PEYWDQETRNVKAQSQTDRVDLGTLRGYYNQSEAGSHTI | | |
| | | QIMYGCDVGSDGRFLRGYRQDAYDGKDYIALNEDLRSWT | | |
| | | AADMAAQITKRKWEAAHEAEQLRAYLDGTCVEWLRRYLE | | |
| | | NGKETLQRTDPPKTHMTHHPISDHEATLRCWALGFYPAE | | |
| | | ITLTWQRDGEDQTQDTELVETRPAGDGTFQKWAAVVVPS | | |
| | | GEEQRYTCHVQHEGLPKPLTLRWELSSQPTIPIVGIIAG | | |
| | | LVLLGAVITGAVVAAVMWRRKSSDRKGGSYTQAASSDSA | | |
| | | QGSDVSLTACKV | | |
| B2M/HLA- | 265 | MSRSVALAVLALLSLSGLEAIQRTPKIQVYSRHPAENGK | 489 | single |
| A*03- | | SNFLNCYVSGFHPSDIEVDLLKNGERIEKVEHSDLSFSK | | chain |
| CD4TM | | DWSFYLLYYTEFTPTEKDEYACRVNHVTLSQPKIVKWDR | | dimer |
| | | DMGGGGSGGGGSGGGGSGGGGSGSHSMRYFFTSVSRPGR | | |
| | | GEPRFIAVGYVDDTQFVRFDSDAASQRMEPRAPWIEQEG | | |
| | | PEYWDQETRNVKAQSQTDRVDLGTLRGYYNQSEAGSHTI | | |
| | | QIMYGCDVGSDGRFLRGYRQDAYDGKDYIALNEDLRSWT | | |
| | | AADMAAQITKRKWEAAHEAEQLRAYLDGTCVEWLRRYLE | | |
| | | NGKETLQRTDPPKTHMTHHPISDHEATLRCWALGFYPAE | | |
| | | ITLTWQRDGEDQTQDTELVETRPAGDGTFQKWAAVVVPS | | |
| | | GEEQRYTCHVQHEGLPKPLTLRWELSSQPTIPIMALIVL | | |
| | | GGVAGLLLFIGLGIFFCVRC | | |
| cPep/B2M/ | 266 | MSRSVALAVLALLSLSGLEARLRAEAQVKGGGGSGGGGS | 490 | single |
| HLA-A*03 | | GGGGSIQRTPKIQVYSRHPAENGKSNFLNCYVSGFHPSD | | chain |
| | | IEVDLLKNGERIEKVEHSDLSFSKDWSFYLLYYTEFTPT | | trimer |
| | | EKDEYACRVNHVTLSQPKIVKWDRDMGGGGSGGGGSGGG | | |
| | | GSGGGGSGSHSMRYFFTSVSRPGRGEPRFIAVGYVDDTQ | | |
| | | FVRFDSDAASQRMEPRAPWIEQEGPEYWDQETRNVKAQS | | |
| | | QTDRVDLGTLRGYYNQSEAGSHTIQIMYGCDVGSDGRFL | | |
| | | RGYRQDAYDGKDYIALNEDLRSWTAADMAAQITKRKWEA | | |
| | | AHEAEQLRAYLDGTCVEWLRRYLENGKETLQRTDPPKTH | | |
| | | MTHHPISDHEATLRCWALGFYPAEITLTWQRDGEDQTQD | | |
| | | TELVETRPAGDGTFQKWAAVVVPSGEEQRYTCHVQHEGL | | |
| | | PKPLTLRWELSSQPTIPIVGIIAGLVLLGAVITGAVVAA | | |
| | | VMWRRKSSDRKGGSYTQAASSDSAQGSDVSLTACKV | | |
| cPep/B2M/ | 267 | MSRSVALAVLALLSLSGLEARLRAEAQVKGGGGSGGGGS | 491 | single |
| HLA-A*03- | | GGGGSIQRTPKIQVYSRHPAENGKSNFLNCYVSGFHPSD | | chain |
| CD4TM | | IEVDLLKNGERIEKVEHSDLSFSKDWSFYLLYYTEFTPT | | trimer |
| | | EKDEYACRVNHVTLSQPKIVKWDRDMGGGGSGGGGSGGG | | |
| | | GSGGGGSGSHSMRYFFTSVSRPGRGEPRFIAVGYVDDTQ | | |
| | | FVRFDSDAASQRMEPRAPWIEQEGPEYWDQETRNVKAQS | | |
| | | QTDRVDLGTLRGYYNQSEAGSHTIQIMYGCDVGSDGRFL | | |
| | | RGYRQDAYDGKDYIALNEDLRSWTAADMAAQITKRKWEA | | |
| | | AHEAEQLRAYLDGTCVEWLRRYLENGKETLQRTDPPKTH | | |
| | | MTHHPISDHEATLRCWALGFYPAEITLTWQRDGEDQTQD | | |
| | | TELVETRPAGDGTFQKWAAVVVPSGEEQRYTCHVQHEGL | | |
| | | PKPLTLRWELSSQPTIPIMALIVLGGVAGLLLFIGLGIF | | |
| | | FCVRC | | |
| B2M/HLA- | 287 | MSRSVALAVLALLSLSGLEAIQRTPKIQVYSRHPAENGK | 492 | single |
| C*04(D227K/ | | SNFLNCYVSGFHPSDIEVDLLKNGERIEKVEHSDLSFSK | | chain |
| T228A) | | DWSFYLLYYTEFTPTEKDEYACRVNHVTLSQPKIVKWDR | | dimer |
| | | DMGGGGSGGGGSGGGGSGGGGSGSHSMRYFSTSVSWPGR | | |
| | | GEPRFIAVGYVDDTQFVRFDSDAASPRGEPREPWVEQEG | | |
| | | PEYWDRETQKYKRQAQADRVNLRKLRGYYNQSEDGSHTL | | |
| | | QRMFGCDLGPDGRLLRGYNQFAYDGKDYIALNEDLRSWT | | |
| | | AADTAAQITQRKWEAAREAEQRRAYLEGTCVEWLRRYLE | | |
| | | NGKETLQRAEHPKTHVTHHPVSDHEATLRCWALGFYPAE | | |
| | | ITLTWQWDGEDQTQKAELVETRPAGDGTFQKWAAVVVPS | | |
| | | GEEQRYTCHVQHEGLPEPLTLRWKPSSQPTIPIVGIVAG | | |
| | | LAVLAVLAVLGAMVAVVMCRRKSSGGKGGSCSQAASSNS | | |
| | | AQGSDESLIACKA | | |
| B2M/HLA- | 288 | MSRSVALAVLALLSLSGLEAIQRTPKIQVYSRHPAENGK | 493 | single |
| C*04(A245V) | | SNFLNCYVSGFHPSDIEVDLLKNGERIEKVEHSDLSFSK | | chain |
| | | DWSFYLLYYTEFTPTEKDEYACRVNHVTLSQPKIVKWDR | | dimer |
| | | DMGGGGSGGGGSGGGGSGGGGSGSHSMRYFSTSVSWPGR | | |
| | | GEPRFIAVGYVDDTQFVRFDSDAASPRGEPREPWVEQEG | | |
| | | PEYWDRETQKYKRQAQADRVNLRKLRGYYNQSEDGSHTL | | |
| | | QRMFGCDLGPDGRLLRGYNQFAYDGKDYIALNEDLRSWT | | |
| | | AADTAAQITQRKWEAAREAEQRRAYLEGTCVEWLRRYLE | | |
| | | NGKETLQRAEHPKTHVTHHPVSDHEATLRCWALGFYPAE | | |
| | | ITLTWQWDGEDQTQDTELVETRPAGDGTFQKWVAVVVPS | | |
| | | GEEQRYTCHVQHEGLPEPLTLRWKPSSQPTIPIVGIVAG | | |
| | | LAVLAVLAVLGAMVAVVMCRRKSSGGKGGSCSQAASSNS | | |
| | | AQGSDESLIACKA | | |
| B2M/HLA- | 289 | MSRSVALAVLALLSLSGLEAIQRTPKIQVYSRHPAENGK | 494 | single |
| C*04(D227K/ | | SNFLNCYVSGFHPSDIEVDLLKNGERIEKVEHSDLSFSK | | chain |
| T228A/A245V) | | DWSFYLLYYTEFTPTEKDEYACRVNHVTLSQPKIVKWDR | | dimer |
| | | DMGGGGSGGGGSGGGGSGGGGSGSHSMRYFSTSVSWPGR | | |
| | | GEPRFIAVGYVDDTQFVRFDSDAASPRGEPREPWVEQEG | | |
| | | PEYWDRETQKYKRQAQADRVNLRKLRGYYNQSEDGSHTL | | |
| | | QRMFGCDLGPDGRLLRGYNQFAYDGKDYIALNEDLRSWT | | |
| | | AADTAAQITQRKWEAAREAEQRRAYLEGTCVEWLRRYLE | | |
| | | NGKETLQRAEHPKTHVTHHPVSDHEATLRCWALGFYPAE | | |
| | | ITLTWQWDGEDQTQKAELVETRPAGDGTFQKWVAVVVPS | | |
| | | GEEQRYTCHVQHEGLPEPLTLRWKPSSQPTIPIVGIVAG | | |
| | | LAVLAVLAVLGAMVAVVMCRRKSSGGKGGSCSQAASSNS | | |
| | | AQGSDESLIACKA | | |
| B2M(K58E)/ | 290 | MSRSVALAVLALLSLSGLEAIQRTPKIQVYSRHPAENGK | 495 | single |
| HLA-C*04 | | SNFLNCYVSGFHPSDIEVDLLKNGERIEKVEHSDLSFSE | | chain |
| | | DWSFYLLYYTEFTPTEKDEYACRVNHVTLSQPKIVKWDR | | dimer |
| | | DMGGGGSGGGGSGGGGSGGGGSGSHSMRYFSTSVSWPGR | | |
| | | GEPRFIAVGYVDDTQFVRFDSDAASPRGEPREPWVEQEG | | |
| | | PEYWDRETQKYKRQAQADRVNLRKLRGYYNQSEDGSHTL | | |
| | | QRMFGCDLGPDGRLLRGYNQFAYDGKDYIALNEDLRSWT | | |
| | | AADTAAQITQRKWEAAREAEQRRAYLEGTCVEWLRRYLE | | |
| | | NGKETLQRAEHPKTHVTHHPVSDHEATLRCWALGFYPAE | | |
| | | ITLTWQWDGEDQTQDTELVETRPAGDGTFQKWAAVVVPS | | |
| | | GEEQRYTCHVQHEGLPEPLTLRWKPSSQPTIPIVGIVAG | | |
| | | LAVLAVLAVLGAMVAVVMCRRKSSGGKGGSCSQAASSNS | | |
| | | AQGSDESLIACKA | | |
| B2M(K58E)/ | 291 | MSRSVALAVLALLSLSGLEAIQRTPKIQVYSRHPAENGK | 496 | single |
| HLA- | | SNFLNCYVSGFHPSDIEVDLLKNGERIEKVEHSDLSFSE | | chain |
| C*04(D227K/ | | DWSFYLLYYTEFTPTEKDEYACRVNHVTLSQPKIVKWDR | | dimer |
| T228A) | | DMGGGGSGGGGSGGGGSGGGGSGSHSMRYFSTSVSWPGR | | |
| | | GEPRFIAVGYVDDTQFVRFDSDAASPRGEPREPWVEQEG | | |
| | | PEYWDRETQKYKRQAQADRVNLRKLRGYYNQSEDGSHTL | | |
| | | QRMFGCDLGPDGRLLRGYNQFAYDGKDYIALNEDLRSWT | | |
| | | AADTAAQITQRKWEAAREAEQRRAYLEGTCVEWLRRYLE | | |
| | | NGKETLQRAEHPKTHVTHHPVSDHEATLRCWALGFYPAE | | |
| | | ITLTWQWDGEDQTQKAELVETRPAGDGTFQKWAAVVVPS | | |
| | | GEEQRYTCHVQHEGLPEPLTLRWKPSSQPTIPIVGIVAG | | |
| | | LAVLAVLAVLGAMVAVVMCRRKSSGGKGGSCSQAASSNS | | |
| | | AQGSDESLIACKA | | |
| B2M(K58E)/ | 292 | MSRSVALAVLALLSLSGLEAIQRTPKIQVYSRHPAENGK | 497 | single |
| HLA- | | SNFLNCYVSGFHPSDIEVDLLKNGERIEKVEHSDLSFSE | | chain |
| C*04(A245V) | | DWSFYLLYYTEFTPTEKDEYACRVNHVTLSQPKIVKWDR | | dimer |
| | | DMGGGGSGGGGSGGGGSGGGGSGSHSMRYFSTSVSWPGR | | |
| | | GEPRFIAVGYVDDTQFVRFDSDAASPRGEPREPWVEQEG | | |
| | | PEYWDRETQKYKRQAQADRVNLRKLRGYYNQSEDGSHTL | | |
| | | QRMFGCDLGPDGRLLRGYNQFAYDGKDYIALNEDLRSWT | | |
| | | AADTAAQITQRKWEAAREAEQRRAYLEGTCVEWLRRYLE | | |
| | | NGKETLQRAEHPKTHVTHHPVSDHEATLRCWALGFYPAE | | |
| | | ITLTWQWDGEDQTQDTELVETRPAGDGTFQKWVAVVVPS | | |
| | | GEEQRYTCHVQHEGLPEPLTLRWKPSSQPTIPIVGIVAG | | |
| | | LAVLAVLAVLGAMVAVVMCRRKSSGGKGGSCSQAASSNS | | |
| | | AQGSDESLIACKA | | |
| B2M(K58E)/ | 293 | MSRSVALAVLALLSLSGLEAIQRTPKIQVYSRHPAENGK | 498 | single |
| HLA- | | SNFLNCYVSGFHPSDIEVDLLKNGERIEKVEHSDLSFSE | | chain |
| C*04(D227K/ | | DWSFYLLYYTEFTPTEKDEYACRVNHVTLSQPKIVKWDR | | dimer |
| T228A/A245V) | | DMGGGGSGGGGSGGGGSGGGGSGSHSMRYFSTSVSWPGR | | |
| | | GEPRFIAVGYVDDTQFVRFDSDAASPRGEPREPWVEQEG | | |
| | | PEYWDRETQKYKRQAQADRVNLRKLRGYYNQSEDGSHTL | | |
| | | QRMFGCDLGPDGRLLRGYNQFAYDGKDYIALNEDLRSWT | | |
| | | AADTAAQITQRKWEAAREAEQRRAYLEGTCVEWLRRYLE | | |
| | | NGKETLQRAEHPKTHVTHHPVSDHEATLRCWALGFYPAE | | |
| | | ITLTWQWDGEDQTQKAELVETRPAGDGTFQKWVAVVVPS | | |
| | | GEEQRYTCHVQHEGLPEPLTLRWKPSSQPTIPIVGIVAG | | |
| | | LAVLAVLAVLGAMVAVVMCRRKSSGGKGGSCSQAASSNS | | |
| | | AQGSDESLIACKA | | |
| B2M/HLA- | 294 | MSRSVALAVLALLSLSGLEAIQRTPKIQVYSRHPAENGK | 499 | single |
| C*04(D227K/ | | SNFLNCYVSGFHPSDIEVDLLKNGERIEKVEHSDLSFSK | | chain |
| T228A)- | | DWSFYLLYYTEFTPTEKDEYACRVNHVTLSQPKIVKWDR | | dimer |
| CD4TM | | DMGGGGSGGGGSGGGGSGGGGSGSHSMRYFSTSVSWPGR | | |
| | | GEPRFIAVGYVDDTQFVRFDSDAASPRGEPREPWVEQEG | | |
| | | PEYWDRETQKYKRQAQADRVNLRKLRGYYNQSEDGSHTL | | |
| | | QRMFGCDLGPDGRLLRGYNQFAYDGKDYIALNEDLRSWT | | |
| | | AADTAAQITQRKWEAAREAEQRRAYLEGTCVEWLRRYLE | | |
| | | NGKETLQRAEHPKTHVTHHPVSDHEATLRCWALGFYPAE | | |
| | | ITLTWQWDGEDQTQKAELVETRPAGDGTFQKWAAVVVPS | | |
| | | GEEQRYTCHVQHEGLPEPLTLRWKPSSQPTIPIMALIVL | | |
| | | GGVAGLLLFIGLGIFFCVRC | | |
| B2M/HLA- | 295 | MSRSVALAVLALLSLSGLEAIQRTPKIQVYSRHPAENGK | 500 | single |
| C*04(A245V)- | | SNFLNCYVSGFHPSDIEVDLLKNGERIEKVEHSDLSFSK | | chain |
| CD4TM | | DWSFYLLYYTEFTPTEKDEYACRVNHVTLSQPKIVKWDR | | dimer |
| | | DMGGGGSGGGGSGGGGSGGGGSGSHSMRYFSTSVSWPGR | | |
| | | GEPRFIAVGYVDDTQFVRFDSDAASPRGEPREPWVEQEG | | |
| | | PEYWDRETQKYKRQAQADRVNLRKLRGYYNQSEDGSHTL | | |
| | | QRMFGCDLGPDGRLLRGYNQFAYDGKDYIALNEDLRSWT | | |
| | | AADTAAQITQRKWEAAREAEQRRAYLEGTCVEWLRRYLE | | |
| | | NGKETLQRAEHPKTHVTHHPVSDHEATLRCWALGFYPAE | | |
| | | ITLTWQWDGEDQTQDTELVETRPAGDGTFQKWVAVVVPS | | |
| | | GEEQRYTCHVQHEGLPEPLTLRWKPSSQPTIPIMALIVL | | |
| | | GGVAGLLLFIGLGIFFCVRC | | |
| B2M/HLA- | 296 | MSRSVALAVLALLSLSGLEAIQRTPKIQVYSRHPAENGK | 501 | single |
| C*04(D227K/ | | SNFLNCYVSGFHPSDIEVDLLKNGERIEKVEHSDLSFSK | | chain |
| T228A/A245V)- | | DWSFYLLYYTEFTPTEKDEYACRVNHVTLSQPKIVKWDR | | dimer |
| CD4TM | | DMGGGGSGGGGSGGGGSGGGGSGSHSMRYFSTSVSWPGR | | |
| | | GEPRFIAVGYVDDTQFVRFDSDAASPRGEPREPWVEQEG | | |
| | | PEYWDRETQKYKRQAQADRVNLRKLRGYYNQSEDGSHTL | | |
| | | QRMFGCDLGPDGRLLRGYNQFAYDGKDYIALNEDLRSWT | | |
| | | AADTAAQITQRKWEAAREAEQRRAYLEGTCVEWLRRYLE | | |
| | | NGKETLQRAEHPKTHVTHHPVSDHEATLRCWALGFYPAE | | |
| | | ITLTWQWDGEDQTQKAELVETRPAGDGTFQKWVAVVVPS | | |
| | | GEEQRYTCHVQHEGLPEPLTLRWKPSSQPTIPIMALIVL | | |
| | | GGVAGLLLFIGLGIFFCVRC | | |
| B2M(K58E)/ | 297 | MSRSVALAVLALLSLSGLEAIQRTPKIQVYSRHPAENGK | 502 | single |
| HLA- | | SNFLNCYVSGFHPSDIEVDLLKNGERIEKVEHSDLSFSE | | chain |
| C*04- | | DWSFYLLYYTEFTPTEKDEYACRVNHVTLSQPKIVKWDR | | dimer |
| CD4TM | | DMGGGGSGGGGSGGGGSGGGGSGSHSMRYFSTSVSWPGR | | |
| | | GEPRFIAVGYVDDTQFVRFDSDAASPRGEPREPWVEQEG | | |
| | | PEYWDRETQKYKRQAQADRVNLRKLRGYYNQSEDGSHTL | | |
| | | QRMFGCDLGPDGRLLRGYNQFAYDGKDYIALNEDLRSWT | | |
| | | AADTAAQITQRKWEAAREAEQRRAYLEGTCVEWLRRYLE | | |
| | | NGKETLQRAEHPKTHVTHHPVSDHEATLRCWALGFYPAE | | |
| | | ITLTWQWDGEDQTQDTELVETRPAGDGTFQKWAAVVVPS | | |
| | | GEEQRYTCHVQHEGLPEPLTLRWKPSSQPTIPIMALIVL | | |
| | | GGVAGLLLFIGLGIFFCVRC | | |
| B2M(K58E)/ | 298 | MSRSVALAVLALLSLSGLEAIQRTPKIQVYSRHPAENGK | 503 | single |
| HLA- | | SNFLNCYVSGFHPSDIEVDLLKNGERIEKVEHSDLSFSE | | chain |
| C*04(D227K/ | | DWSFYLLYYTEFTPTEKDEYACRVNHVTLSQPKIVKWDR | | dimer |
| T228A)- | | DMGGGGSGGGGSGGGGSGGGGSGSHSMRYFSTSVSWPGR | | |
| CD4TM | | GEPRFIAVGYVDDTQFVRFDSDAASPRGEPREPWVEQEG | | |
| | | PEYWDRETQKYKRQAQADRVNLRKLRGYYNQSEDGSHTL | | |
| | | QRMFGCDLGPDGRLLRGYNQFAYDGKDYIALNEDLRSWT | | |
| | | AADTAAQITQRKWEAAREAEQRRAYLEGTCVEWLRRYLE | | |
| | | NGKETLQRAEHPKTHVTHHPVSDHEATLRCWALGFYPAE | | |
| | | ITLTWQWDGEDQTQKAELVETRPAGDGTFQKWAAVVVPS | | |
| | | GEEQRYTCHVQHEGLPEPLTLRWKPSSQPTIPIMALIVL | | |
| | | GGVAGLLLFIGLGIFFCVRC | | |
| B2M(K58E)/ | 299 | MSRSVALAVLALLSLSGLEAIQRTPKIQVYSRHPAENGK | 504 | single |
| HLA- | | SNFLNCYVSGFHPSDIEVDLLKNGERIEKVEHSDLSFSE | | chain |
| C*04(A245V)- | | DWSFYLLYYTEFTPTEKDEYACRVNHVTLSQPKIVKWDR | | dimer |
| CD4TM | | DMGGGGSGGGGSGGGGSGGGGSGSHSMRYFSTSVSWPGR | | |
| | | GEPRFIAVGYVDDTQFVRFDSDAASPRGEPREPWVEQEG | | |
| | | PEYWDRETQKYKRQAQADRVNLRKLRGYYNQSEDGSHTL | | |
| | | QRMFGCDLGPDGRLLRGYNQFAYDGKDYIALNEDLRSWT | | |
| | | AADTAAQITQRKWEAAREAEQRRAYLEGTCVEWLRRYLE | | |
| | | NGKETLQRAEHPKTHVTHHPVSDHEATLRCWALGFYPAE | | |
| | | ITLTWQWDGEDQTQDTELVETRPAGDGTFQKWVAVVVPS | | |
| | | GEEQRYTCHVQHEGLPEPLTLRWKPSSQPTIPIMALIVL | | |
| | | GGVAGLLLFIGLGIFFCVRC | | |
| B2M(K58E)/ | 300 | MSRSVALAVLALLSLSGLEAIQRTPKIQVYSRHPAENGK | 505 | single |
| HLA- | | SNFLNCYVSGFHPSDIEVDLLKNGERIEKVEHSDLSFSE | | chain |
| C*04(D227K/ | | DWSFYLLYYTEFTPTEKDEYACRVNHVTLSQPKIVKWDR | | dimer |
| T228A/A245V)- | | DMGGGGSGGGGSGGGGSGGGGSGSHSMRYFSTSVSWPGR | | |
| CD4TM | | GEPRFIAVGYVDDTQFVRFDSDAASPRGEPREPWVEQEG | | |
| | | PEYWDRETQKYKRQAQADRVNLRKLRGYYNQSEDGSHTL | | |
| | | QRMFGCDLGPDGRLLRGYNQFAYDGKDYIALNEDLRSWT | | |
| | | AADTAAQITQRKWEAAREAEQRRAYLEGTCVEWLRRYLE | | |
| | | NGKETLQRAEHPKTHVTHHPVSDHEATLRCWALGFYPAE | | |
| | | ITLTWQWDGEDQTQKAELVETRPAGDGTFQKWVAVVVPS | | |
| | | GEEQRYTCHVQHEGLPEPLTLRWKPSSQPTIPIMALIVL | | |
| | | GGVAGLLLFIGLGIFFCVRC | | |
| B2M(W60G)/ | 301 | MSRSVALAVLALLSLSGLEAIQRTPKIQVYSRHPAENGK | 506 | single |
| HLA-A*02 | | SNFLNCYVSGFHPSDIEVDLLKNGERIEKVEHSDLSFSK | | chain |
| | | DGSFYLLYYTEFTPTEKDEYACRVNHVTLSQPKIVKWDR | | dimer |
| | | DMGGGGSGGGGSGGGGSGGGGSGSHSMRYFFTSVSRPGR | | |
| | | GEPRFIAVGYVDDTQFVRFDSDAASQRMEPRAPWIEQEG | | |
| | | PEYWDGETRKVKAHSQTHRVDLGTLRGYYNQSEAGSHTV | | |
| | | QRMYGCDVGSDWRFLRGYHQYAYDGKDYIALKEDLRSWT | | |
| | | AADMAAQTTKHKWEAAHVAEQLRAYLEGTCVEWLRRYLE | | |
| | | NGKETLQRTDAPKTHMTHHAVSDHEATLRCWALSFYPAE | | |
| | | ITLTWQRDGEDQTQDTELVETRPAGDGTFQKWAAVVVPS | | |
| | | GQEQRYTCHVQHEGLPKPLTLRWEPSSQPTIPIVGIIAG | | |
| | | LVLFGAVITGAVVAAVMWRRKSSDRKGGSYSQAASSDSA | | |
| | | QGSDVSLTACKV | | |
| B2M(W60G)/ | 302 | MSRSVALAVLALLSLSGLEAIQRTPKIQVYSRHPAENGK | 507 | single |
| HLA- | | SNFLNCYVSGFHPSDIEVDLLKNGERIEKVEHSDLSFSK | | chain |
| A*02(D227K/ | | DGSFYLLYYTEFTPTEKDEYACRVNHVTLSQPKIVKWDR | | dimer |
| T228A) | | DMGGGGSGGGGSGGGGSGGGGSGSHSMRYFFTSVSRPGR | | |
| | | GEPRFIAVGYVDDTQFVRFDSDAASQRMEPRAPWIEQEG | | |
| | | PEYWDGETRKVKAHSQTHRVDLGTLRGYYNQSEAGSHTV | | |
| | | QRMYGCDVGSDWRFLRGYHQYAYDGKDYIALKEDLRSWT | | |
| | | AADMAAQTTKHKWEAAHVAEQLRAYLEGTCVEWLRRYLE | | |
| | | NGKETLQRTDAPKTHMTHHAVSDHEATLRCWALSFYPAE | | |
| | | ITLTWQRDGEDQTQKAELVETRPAGDGTFQKWAAVVVPS | | |
| | | GQEQRYTCHVQHEGLPKPLTLRWEPSSQPTIPIVGIIAG | | |
| | | LVLFGAVITGAVVAAVMWRRKSSDRKGGSYSQAASSDSA | | |
| | | QGSDVSLTACKV | | |
| B2M(W60G)/ | 303 | MSRSVALAVLALLSLSGLEAIQRTPKIQVYSRHPAENGK | 508 | single |
| HLA-C*04 | | SNFLNCYVSGFHPSDIEVDLLKNGERIEKVEHSDLSFSK | | chain |
| | | DGSFYLLYYTEFTPTEKDEYACRVNHVTLSQPKIVKWDR | | dimer |
| | | DMGGGGSGGGGSGGGGSGGGGSGSHSMRYFSTSVSWPGR | | |
| | | GEPRFIAVGYVDDTQFVRFDSDAASPRGEPREPWVEQEG | | |
| | | PEYWDRETQKYKRQAQADRVNLRKLRGYYNQSEDGSHTL | | |
| | | QRMFGCDLGPDGRLLRGYNQFAYDGKDYIALNEDLRSWT | | |
| | | AADTAAQITQRKWEAAREAEQRRAYLEGTCVEWLRRYLE | | |
| | | NGKETLQRAEHPKTHVTHHPVSDHEATLRCWALGFYPAE | | |
| | | ITLTWQWDGEDQTQDTELVETRPAGDGTFQKWAAVVVPS | | |
| | | GEEQRYTCHVQHEGLPEPLTLRWKPSSQPTIPIVGIVAG | | |
| | | LAVLAVLAVLGAMVAVVMCRRKSSGGKGGSCSQAASSNS | | |
| | | AQGSDESLIACKA | | |
| B2M(W60G)/ | 304 | MSRSVALAVLALLSLSGLEAIQRTPKIQVYSRHPAENGK | 509 | single |
| HLA- | | SNFLNCYVSGFHPSDIEVDLLKNGERIEKVEHSDLSFSK | | chain |
| C*04(D227K/ | | DGSFYLLYYTEFTPTEKDEYACRVNHVTLSQPKIVKWDR | | dimer |
| T228A) | | DMGGGGSGGGGSGGGGSGGGGSGSHSMRYFSTSVSWPGR | | |
| | | GEPRFIAVGYVDDTQFVRFDSDAASPRGEPREPWVEQEG | | |
| | | PEYWDRETQKYKRQAQADRVNLRKLRGYYNQSEDGSHTL | | |
| | | QRMFGCDLGPDGRLLRGYNQFAYDGKDYIALNEDLRSWT | | |
| | | AADTAAQITQRKWEAAREAEQRRAYLEGTCVEWLRRYLE | | |
| | | NGKETLQRAEHPKTHVTHHPVSDHEATLRCWALGFYPAE | | |
| | | ITLTWQWDGEDQTQKAELVETRPAGDGTFQKWAAVVVPS | | |
| | | GEEQRYTCHVQHEGLPEPLTLRWKPSSQPTIPIVGIVAG | | |
| | | LAVLAVLAVLGAMVAVVMCRRKSSGGKGGSCSQAASSNS | | |
| | | AQGSDESLIACKA | | |
| B2M/HLA- | 306 | MSRSVALAVLALLSLSGLEAIQRTPKIQVYSRHPAENGK | 526 | single |
| C*04(A73T) | | SNFLNCYVSGFHPSDIEVDLLKNGERIEKVEHSDLSFSK | | chain |
| | | DWSFYLLYYTEFTPTEKDEYACRVNHVTLSQPKIVKWDR | | |
| | | DMGGGGSGGGGSGGGGSGGGGSGSHSMRYFSTSVSWPGR | | |
| | | GEPRFIAVGYVDDTQFVRFDSDAASPRGEPREPWVEQEG | | |
| | | PEYWDRETQKYKRQAQTDRVNLRKLRGYYNQSEDGSHTL | | dimer |
| | | QRMFGCDLGPDGRLLRGYNQFAYDGKDYIALNEDLRSWT | | |
| | | AADTAAQITQRKWEAAREAEQRRAYLEGTCVEWLRRYLE | | |
| | | NGKETLQRAEHPKTHVTHHPVSDHEATLRCWALGFYPAE | | |
| | | ITLTWQWDGEDQTQDTELVETRPAGDGTFQKWAAVVVPS | | |
| | | GEEQRYTCHVQHEGLPEPLTLRWKPSSQPTIPIVGIVAG | | |
| | | LAVLAVLAVLGAMVAVVMCRRKSSGGKGGSCSQAASSNS | | |
| | | AQGSDESLIACKA | | |
| B2M/HLA- | 307 | MSRSVALAVLALLSLSGLEAIQRTPKIQVYSRHPAENGK | 527 | single |
| C*04(A73T/ | | SNFLNCYVSGFHPSDIEVDLLKNGERIEKVEHSDLSFSK | | chain |
| D227K/T228A) | | DWSFYLLYYTEFTPTEKDEYACRVNHVTLSQPKIVKWDR | | dimer |
| | | DMGGGGSGGGGSGGGGSGGGGSGSHSMRYFSTSVSWPGR | | |
| | | GEPRFIAVGYVDDTQFVRFDSDAASPRGEPREPWVEQEG | | |
| | | PEYWDRETQKYKRQAQTDRVNLRKLRGYYNQSEDGSHTL | | |
| | | QRMFGCDLGPDGRLLRGYNQFAYDGKDYIALNEDLRSWT | | |
| | | AADTAAQITQRKWEAAREAEQRRAYLEGTCVEWLRRYLE | | |
| | | NGKETLQRAEHPKTHVTHHPVSDHEATLRCWALGFYPAE | | |
| | | ITLTWQWDGEDQTQKAELVETRPAGDGTFQKWAAVVVPS | | |
| | | GEEQRYTCHVQHEGLPEPLTLRWKPSSQPTIPIVGIVAG | | |
| | | LAVLAVLAVLGAMVAVVMCRRKSSGGKGGSCSQAASSNS | | |
| | | AQGSDESLIACKA | | |
| cPep/B2M/ | 322 | MSRSVALAVLALLSLSGLEARYRPGTVALGGGGSGGGGS | 528 | single |
| HLA- | | GGGGSIQRTPKIQVYSRHPAENGKSNFLNCYVSGFHPSD | | chain |
| C*07(C1G/ | | IEVDLLKNGERIEKVEHSDLSFSKDWSFYLLYYTEFTPT | | trimer |
| A73T) | | EKDEYACRVNHVTLSQPKIVKWDRDMGGGGSGGGGSGGG | | |
| | | GSGGGGSGSHSMRYFDTAVSRPGRGEPRFISVGYVDDTQ | | |
| | | FVRFDSDAASPRGEPRAPWVEQEGPEYWDRETQKYKRQA | | |
| | | QTDRVSLRNLRGYYNQSEDGSHTLQRMSGCDLGPDGRLL | | |
| | | RGYDQSAYDGKDYIALNEDLRSWTAADTAAQITQRKLEA | | |
| | | ARAAEQLRAYLEGTCVEWLRRYLENGKETLQRAEPPKTH | | |
| | | VTHHPLSDHEATLRCWALGFYPAEITLTWQRDGEDQTQD | | |
| | | TELVETRPAGDGTFQKWAAVVVPSGQEQRYTCHMQHEGL | | |
| | | QEPLTLSWEPSSQPTIPIMGIVAGLAVLVVLAVLGAVVT | | |
| | | AMMCRRKSSGGKGGSCSQAACSNSAQGSDESLITCKA | | |
| IV9(AA)/B2M/ | 337 | MSRSVALAVLALLSLSGLEAIIDKSGAAVGGGGSG | 533 | single |
| HLA- | | GGGSGGGGSIQRTPKIQVYSRHPAENGKSNFLNCY | | chain |
| C*05(C1G) | | VSGFHPSDIEVDLLKNGERIEKVEHSDLSFSKDWS | | trimer |
| | | FYLLYYTEFTPTEKDEYACRVNHVTLSQPKIVKWD | | |
| | | RDMGGGGSGGGGSGGGGSGGGGSGSHSMRYFYTAV | | |
| | | SRPGRGEPRFIAVGYVDDTQFVQFDSDAASPRGEP | | |
| | | RAPWVEQEGPEYWDRETQKYKRQAQTDRVNLRKLR | | |
| | | GYYNQSEAGSHTLQRMYGCDLGPDGRLLRGYNQFA | | |
| | | YDGKDYIALNEDLRSWTAADKAAQITQRKWEAARE | | |
| | | AEQRRAYLEGTCVEWLRRYLENGKKTLQRAEHPKT | | |
| | | HVTHHPVSDHEATLRCWALGFYPAEITLTWQRDGE | | |
| | | DQTQDTELVETRPAGDGTFQKWAAVVVPSGEEQRY | | |
| | | TCHVQHEGLPEPLTLRWGPSSQPTIPIVGIVAGLA | | |
| | | VLAVLAVLGAVMAVVMCRRKSSGGKGGSCSQAASS | | |
| | | NSAQGSDESLIACKA | | |
| IV9(EE)/B2M/ | 339 | MSRSVALAVLALLSLSGLEAIIDKSGEEVGGGGSG | 534 | single |
| HLA- | | GGGSGGGGSIQRTPKIQVYSRHPAENGKSNFLNCY | | chain |
| C*05(C1G) | | VSGFHPSDIEVDLLKNGERIEKVEHSDLSFSKDWS | | trimer |
| | | FYLLYYTEFTPTEKDEYACRVNHVTLSQPKIVKWD | | |
| | | RDMGGGGSGGGGSGGGGSGGGGSGSHSMRYFYTAV | | |
| | | SRPGRGEPRFIAVGYVDDTQFVQFDSDAASPRGEP | | |
| | | RAPWVEQEGPEYWDRETQKYKRQAQTDRVNLRKLR | | |
| | | GYYNQSEAGSHTLQRMYGCDLGPDGRLLRGYNQFA | | |
| | | YDGKDYIALNEDLRSWTAADKAAQITQRKWEAARE | | |
| | | AEQRRAYLEGTCVEWLRRYLENGKKTLQRAEHPKT | | |
| | | HVTHHPVSDHEATLRCWALGFYPAEITLTWQRDGE | | |
| | | DQTQDTELVETRPAGDGTFQKWAAVVVPSGEEQRY | | |
| | | TCHVQHEGLPEPLTLRWGPSSQPTIPIVGIVAGLA | | |
| | | VLAVLAVLGAVMAVVMCRRKSSGGKGGSCSQAASS | | |
| | | NSAQGSDESLIACKA | | |
| IV9(LA)/B2M/ | 338 | MSRSVALAVLALLSLSGLEAIIDKSGLAVGGGGSG | 535 | single |
| HLA- | | GGGSGGGGSIQRTPKIQVYSRHPAENGKSNFLNCY | | chain |
| C*05(C1G) | | VSGFHPSDIEVDLLKNGERIEKVEHSDLSFSKDWS | | trimer |
| | | FYLLYYTEFTPTEKDEYACRVNHVTLSQPKIVKWD | | |
| | | RDMGGGGSGGGGSGGGGSGGGGSGSHSMRYFYTAV | | |
| | | SRPGRGEPRFIAVGYVDDTQFVQFDSDAASPRGEP | | |
| | | RAPWVEQEGPEYWDRETQKYKRQAQTDRVNLRKLR | | |
| | | GYYNQSEAGSHTLQRMYGCDLGPDGRLLRGYNQFA | | |
| | | YDGKDYIALNEDLRSWTAADKAAQITQRKWEAARE | | |
| | | AEQRRAYLEGTCVEWLRRYLENGKKTLQRAEHPKT | | |
| | | HVTHHPVSDHEATLRCWALGFYPAEITLTWQRDGE | | |
| | | DQTQDTELVETRPAGDGTFQKWAAVVVPSGEEQRY | | |
| | | TCHVQHEGLPEPLTLRWGPSSQPTIPIVGIVAGLA | | |
| | | VLAVLAVLGAVMAVVMCRRKSSGGKGGSCSQAASS | | |
| | | NSAQGSDESLIACKA | | |
| IV9(WT)/ | 336 | MSRSVALAVLALLSLSGLEAIIDKSGSTVGGGGSG | 536 | single |
| B2M/HLA- | | GGGSGGGGSIQRTPKIQVYSRHPAENGKSNFLNCY | | chain |
| C*05(C1G) | | VSGFHPSDIEVDLLKNGERIEKVEHSDLSFSKDWS | | trimer |
| | | FYLLYYTEFTPTEKDEYACRVNHVTLSQPKIVKWD | | |
| | | RDMGGGGSGGGGSGGGGSGGGGSGSHSMRYFYTAV | | |
| | | SRPGRGEPRFIAVGYVDDTQFVQFDSDAASPRGEP | | |
| | | RAPWVEQEGPEYWDRETQKYKRQAQTDRVNLRKLR | | |
| | | GYYNQSEAGSHTLQRMYGCDLGPDGRLLRGYNQFA | | |
| | | YDGKDYIALNEDLRSWTAADKAAQITQRKWEAARE | | |
| | | AEQRRAYLEGTCVEWLRRYLENGKKTLQRAEHPKT | | |
| | | HVTHHPVSDHEATLRCWALGFYPAEITLTWQRDGE | | |
| | | DQTQDTELVETRPAGDGTFQKWAAVVVPSGEEQRY | | |
| | | TCHVQHEGLPEPLTLRWGPSSQPTIPIVGIVAGLA | | |
| | | VLAVLAVLGAVMAVVMCRRKSSGGKGGSCSQAASS | | |
| | | NSAQGSDESLIACKA | | |
| B2M/HLA- | 268 | MSRSVALAVLALLSLSGLEAIQRTPKIQVYSRHPA | 659 | single |
| E-CD4TM | | ENGKSNFLNCYVSGFHPSDIEVDLLKNGERIEKVE | | chain |
| | | HSDLSFSKDWSFYLLYYTEFTPTEKDEYACRVNHV | | dimer |
| | | TLSQPKIVKWDRDMGGGGSGGGGSGGGGSGGGGSG | | |
| | | SHSLKYFHTSVSRPGRGEPRFISVGYVDDTQFVRF | | |
| | | DNDAASPRMVPRAPWMEQEGSEYWDRETRSARDTA | | |
| | | QIFRVNLRTLRGYYNQSEAGSHTLQWMHGCELGPD | | |
| | | GRFLRGYEQFAYDGKDYLTLNEDLRSWTAVDTAAQ | | |
| | | ISEQKSNDASEAEHQRAYLEDTCVEWLHKYLEKGK | | |
| | | ETLLHLEPPKTHVTHHPISDHEATLRCWALGFYPA | | |
| | | EITLTWQQDGEGHTQDTELVETRPAGDGTFQKWAA | | |
| | | VVVPSGEEQRYTCHVQHEGLPEPVTLRWKPASQPT | | |
| | | IPIMALIVLGGVAGLLLFIGLGIFFCVRC | | |
| cPep/B2M/ | 269 | MSRSVALAVLALLSLSGLEAVMAPRTLFLGGGGSG | 660 | single |
| HLA-E- | | GGGSGGGGSIQRTPKIQVYSRHPAENGKSNFLNCY | | chain |
| CD4TM | | VSGFHPSDIEVDLLKNGERIEKVEHSDLSFSKDWS | | trimer |
| | | FYLLYYTEFTPTEKDEYACRVNHVTLSQPKIVKWD | | |
| | | RDMGGGGSGGGGSGGGGSGGGGSGSHSLKYFHTSV | | |
| | | SRPGRGEPRFISVGYVDDTQFVRFDNDAASPRMVP | | |
| | | RAPWMEQEGSEYWDRETRSARDTAQIFRVNLRTLR | | |
| | | GYYNQSEAGSHTLQWMHGCELGPDGRFLRGYEQFA | | |
| | | YDGKDYLTLNEDLRSWTAVDTAAQISEQKSNDASE | | |
| | | AEHQRAYLEDTCVEWLHKYLEKGKETLLHLEPPKT | | |
| | | HVTHHPISDHEATLRCWALGFYPAEITLTWQQDGE | | |
| | | GHTQDTELVETRPAGDGTFQKWAAVVVPSGEEQRY | | |
| | | TCHVQHEGLPEPVTLRWKPASQPTIPIMALIVLGG | | |
| | | VAGLLLFIGLGIFFCVRC | | |
| CTLA4(ECD)/ | 325 | MSRSVALAVLALLSLSGLEAKAMHVAQPAVVLASS | 661 | functio |
| B2M/ | | RGIASFVCEYASPGKATEVRVTVLRQADSQVTEVC | | nalized |
| HLA-B*57 | | AATYMMGNELTFLDDSICTGTSSGNQVNLTIQGLR | | single |
| | | AMDTGLYICKVELMYPPPYYLGIGNGTQIYVIDPE | | chain |
| | | PCPDSDGGGGSGGGGSGGGGSGGGGSIQRTPKIQV | | dimer |
| | | YSRHPAENGKSNFLNCYVSGFHPSDIEVDLLKNGE | | |
| | | RIEKVEHSDLSFSKDWSFYLLYYTEFTPTEKDEYA | | |
| | | CRVNHVTLSQPKIVKWDRDMGGGGSGGGGSGGGGS | | |
| | | GGGGSGSHSMRYFYTAMSRPGRGEPRFIAVGYVDD | | |
| | | TQFVRFDSDAASPRMAPRAPWIEQEGPEYWDGETR | | |
| | | NMKASAQTYRENLRIALRYYNQSEAGSHIIQVMYG | | |
| | | CDVGPDGRLLRGHDQSAYDGKDYIALNEDLSSWTA | | |
| | | ADTAAQITQRKWEAARVAEQLRAYLEGLCVEWLRR | | |
| | | YLENGKETLQRADPPKTHVTHHPISDHEATLRCWA | | |
| | | LGFYPAEITLTWQRDGEDQTQDTELVETRPAGDRT | | |
| | | FQKWAAVVVPSGEEQRYTCHVQHEGLPKPLTLRWE | | |
| | | PSSQSTVPIVGIVAGLAVLAVVVIGAVVAAVMCRR | | |
| | | KSSGGKGGSYSQAACSDSAQGSDVSLTA | | |
| B2M/HLA- | 327 | MSRSVALAVLALLSLSGLEAIQRTPKIQVYSRHPA | 662 | functio |
| B*57(ΔTM)- | | ENGKSNFLNCYVSGFHPSDIEVDLLINGERIEKVE | | nalized |
| CD47 | | HSDLSFSKDWSFYLLYYTEFTPTEKDEYACRVNHV | | single |
| | | TLSQPKIVKWDRDMGGGGSGGGGSGGGGSGGGGSG | | chain |
| | | SHSMRYFYTAMSRPGRGEPRFIAVGYVDDTQFVRF | | dimer |
| | | DSDAASPRMAPRAPWIEQEGPEYWDGETRNMKASA | | |
| | | QTYRENLRIALRYYNQSEAGSHIIQVMYGCDVGPD | | |
| | | GRLLRGHDQSAYDGKDYIALNEDLSSWTAADTAAQ | | |
| | | ITQRKWEAARVAEQLRAYLEGLCVEWLRRYLENGK | | |
| | | ETLQRADPPKTHVTHHPISDHEATLRCWALGFYPA | | |
| | | EITLTWQRDGEDQTQDTELVETRPAGDRTFQKWAA | | |
| | | VVVPSGEEQRYTCHVQHEGLPKPLTLRWEAAAGGQ | | |
| | | LLFNKTKSVEFTFCNDTVVIPCFVTNMEAQNTTEV | | |
| | | YVKWKFKGRDIYTFDGALNKSTVPTDFSSAKIEVS | | |
| | | QLLKGDASLKMDKSDAVSHTGNYTCEVTELTREGE | | |
| | | TIIELKYRVVSWFSPNENILIVIFPIFAILLFWGQ | | |
| | | FGIKTLKYRSGGMDEKTIALLVAGLVITVIVIVGA | | |
| | | ILFVPGEYSLKNATGLGLIVTSTGILILLHYYVFS | | |
| | | TAIGLTSFVIAILVIQVIAYILAVVGLSLCIAACI | | |
| | | PMHGPLLISGLSILALAQLLGLVYMKFVASNQKTI | | |
| | | QPPRKAVEEPLNAFKESKGMMNDE | | |
| B2M/HLA | 328 | MSRSVALAVLALLSLSGLEAIQRTPKIQVYSRHPA | 663 | functio |
| B*57(ΔTM)/ | | ENGKSNFLNCYVSGFHPSDIEVDLLKNGERIEKVE | | nalized |
| CD47 | | HSDLSFSKDWSFYLLYYTEFTPTEKDEYACRVNHV | | single |
| | | TLSQPKIVKWDRDMGGGGSGGGGSGGGGSGGGGSG | | chain |
| | | SHSMRYFYTAMSRPGRGEPRFIAVGYVDDTQFVRF | | dimer |
| | | DSDAASPRMAPRAPWIEQEGPEYWDGETRNMKASA | | |
| | | QTYRENLRIALRYYNQSEAGSHIIQVMYGCDVGPD | | |
| | | GRLLRGHDQSAYDGKDYIALNEDLSSWTAADTAAQ | | |
| | | ITQRKWEAARVAEQLRAYLEGLCVEWLRRYLENGK | | |
| | | ETLQRADPPKTHVTHHPISDHEATLRCWALGFYPA | | |
| | | EITLTWQRDGEDQTQDTELVETRPAGDRTFQKWAA | | |
| | | VVVPSGEEQRYTCHVQHEGLPKPLTLRWEGGGGSG | | |
| | | GGGSGGGGSGGGGSQLLFNKTKSVEFTFCNDTVVI | | |
| | | PCFVTNMEAQNTTEVYVKWKFKGRDIYTFDGALNK | | |
| | | STVPTDFSSAKIEVSQLLKGDASLKMDKSDAVSHT | | |
| | | GNYTCEVTELTREGETIIELKYRVVSWFSPNENIL | | |
| | | IVIFPIFAILLFWGQFGIKTLKYRSGGMDEKTIAL | | |
| | | LVAGLVITVIVIVGAILFVPGEYSLKNATGLGLIV | | |
| | | TSTGILILLHYYVFSTAIGLTSFVIAILVIQVIAY | | |
| | | ILAVVGLSLCIAACIPMHGPLLISGLSILALAQLL | | |
| | | GLVYMKFVASNQKTIQPPRKAVEEPLNAFKESKGM | | |
| | | MNDE | | |
| B2M/HLA- | 332 | MSRSVALAVLALLSLSGLEAIQRTPKIQVYSRHPA | 664 | functio |
| C*05(ΔTM)/ | | ENGKSNFLNCYVSGFHPSDIEVDLLKNGERIEKVE | | nalized |
| B2M/HLA- | | HSDLSFSKDWSFYLLYYTEFTPTEKDEYACRVNHV | | single |
| B*58 | | TLSQPKIVKWDRDMGGGGSGGGGSGGGGSGGGGSG | | chain |
| | | SHSMRYFYTAVSRPGRGEPRFIAVGYVDDTQFVQF | | dimer |
| | | DSDAASPRGEPRAPWVEQEGPEYWDRETQKYKRQA | | |
| | | QTDRVNLRKLRGYYNQSEAGSHTLQRMYGCDLGPD | | |
| | | GRLLRGYNQFAYDGKDYIALNEDLRSWTAADKAAQ | | |
| | | ITQRKWEAAREAEQRRAYLEGTCVEWLRRYLENGK | | |
| | | KTLQRAEHPKTHVTHHPVSDHEATLRCWALGFYPA | | |
| | | EITLTWQRDGEDQTQDTELVETRPAGDGTFQKWAA | | |
| | | VVVPSGEEQRYTCHVQHEGLPEPLTLRWGGGGGSG | | |
| | | GGGSGGGGSGGGGSIQRTPKIQVYSRHPAENGKSN | | |
| | | FLNCYVSGFHPSDIEVDLLKNGERIEKVEHSDLSF | | |
| | | SKDWSFYLLYYTEFTPTEKDEYACRVNHVTLSQPK | | |
| | | IVKWDRDMGGGGSGGGGSGGGGSGGGGSGSHSMRY | | |
| | | FYTAMSRPGRGEPRFIAVGYVDDTQFVRFDSDAAS | | |
| | | PRMAPRAPWIEQEGPEYWDGETRNMKASAQTYREN | | |
| | | LRIALRYYNQSEAGSHIIQVMYGCDVGPDGRLLRG | | |
| | | HDQSAYDGKDYIALNEDLSSWTAADTAAQITQRKW | | |
| | | EAARVAEQLRAYLEGLCVEWLRRYLENGKETLQRA | | |
| | | DPPKTHVTHHPISDHEATLRCWALGFYPAEITLTW | | |
| | | QRDGEDQTQDTELVETRPAGDRTFQKWAAVVVPSG | | |
| | | EEQRYTCHVQHEGLPKPLTLRWEPSSQSTVPIVGI | | |
| | | VAGLAVLAVVVIGAVVAAVMCRRKSSGGKGGSYSQ | | |
| | | AACSDSAQGSDVSLTA | | |
| cPep/B2M/ | 330 | MSRSVALAVLALLSLSGLEAVMAPRTLFLGGGGSG | 665 | function- |
| HLA-E | | GGGSGGGGSIQRTPKIQVYSRHPAENGKSNFLNCY | | alized |
| (ΔTM)/B2M/ | | VSGFHPSDIEVDLLKNGERIEKVEHSDLSFSKDWS | | single |
| HLA-B*57 | | FYLLYYTEFTPTEKDEYACRVNHVTLSQPKIVKWD | | chain |
| | | RDMGGGGSGGGGSGGGGSGGGGSGSHSLKYFHTSV | | dimer |
| | | SRPGRGEPRFISVGYVDDTQFVRFDNDAASPRMVP | | |
| | | RAPWMEQEGSEYWDRETRSARDTAQIFRVNLRTLR | | |
| | | GYYNQSEAGSHTLQWMHGCELGPDGRFLRGYEQFA | | |
| | | YDGKDYLTLNEDLRSWTAVDTAAQISEQKSNDASE | | |
| | | AEHQRAYLEDTCVEWLHKYLEKGKETLLHLEPPKT | | |
| | | HVTHHPISDHEATLRCWALGFYPAEITLTWQQDGE | | |
| | | GHTQDTELVETRPAGDGTFQKWAAVVVPSGEEQRY | | |
| | | TCHVQHEGLPEPVTLRWKGGGGSGGGGSGGGGSGG | | |
| | | GGSIQRTPKIQVYSRHPAENGKSNFLNCYVSGFHP | | |
| | | SDIEVDLLKNGERIEKVEHSDLSFSKDWSFYLLYY | | |
| | | TEFTPTEKDEYACRVNHVTLSQPKIVKWDRDMGGG | | |
| | | GSGGGGSGGGGSGGGGSGSHSMRYFYTAMSRPGRG | | |
| | | EPRFIAVGYVDDTQFVRFDSDAASPRMAPRAPWIE | | |
| | | QEGPEYWDGETRNMKASAQTYRENLRIALRYYNQS | | |
| | | EAGSHIIQVMYGCDVGPDGRLLRGHDQSAYDGKDY | | |
| | | IALNEDLSSWTAADTAAQITQRKWEAARVAEQLRA | | |
| | | YLEGLCVEWLRRYLENGKETLQRADPPKTHVTHHP | | |
| | | ISDHEATLRCWALGFYPAEITLTWQRDGEDQTQDT | | |
| | | ELVETRPAGDRTFQKWAAVVVPSGEEQRYTCHVQH | | |
| | | EGLPKPLTLRWEPSSQSTVPIVGIVAGLAVLAVVV | | |
| | | IGAVVAAVMCRRKSSGGKGGSYSQAACSDSAQGSD | | |
| | | VSLTA | | |

¹In the descriptions of each polypeptide, the domains contained within the polypeptide are listed in order from N-terminus to C-terminus and backslashes (“/”) that are not contained within parenthesis represent linkers). Signal peptides are indicated by bold italic text, linker amino acid sequences are indicated by bold text, and transmembrane domains (e.g., a WT transmembrane domain, such as in B2M/HLA-A*02, or a CD4 transmembrane domain, such as in B2M/HLA- A*02-CD4TM) are indicated by underlined text. In Table 8A “cPep” indicates a cognate peptide. In Table 8A, IV9 (AA), IV9 (EE), IV9 (LA), IV9 (WT) represent alternative cPep sequences (see. e.g., Sim, et al. “Canonical and Cross-reactive Binding of NK Cell Inhibitory Receptors to Hla-C Allotypes is Dictated by Peptides Bound to HLA-C, Frontiers in Immunology, vol. 8, art. 193 (2017), the disclosure of which is incorporated herein by reference in its entirety for all purposes). “Functionalized” single chain dimers and trimers are single-chain dimers and trimers that have been fused to an effector domain that inhibits activation of alloreactive T cells or natural killer cells (e.g., a CTLA4 extracellular domain (ECD), or an additional single-chain trimer or dimer, a CD47 domain). ΔTM indicates that the transmembrane (TM) domain of the indicated HLA class-I heavy chain domain has been deleted.
The identification numbers (ID#′s) correspond to those used in FIGs. 11-13.

TABLE 8B
Amino acid sequences for HLA class-I single-chain dimers.

| | | SEQ | |
|---|---|---|---|
| Description | Codon-optimized nucleotide sequence | ID NO | Format |
| B2M/HLA- | ATGAGCCGGAGCGTGGCTCTGGCCGTGCTGGCCCTATTGTCTCT | 510 | single |
| A*02 | GAGCGGACTGGAAGCCATCCAGAGAACCCCAAAGATCCAAGTGT | | chain |
| | ACAGCAGACACCCTGCCGAGAACGGCAAGAGCAATTTCCTGAAC | | dimer |
| | TGCTACGTGTCCGGCTTTCACCCCAGCGACATCGAGGTGGATCT | | |
| | GCTGAAGAACGGCGAGAGAATCGAGAAGGTCGAACACAGCGATC | | |
| | TGAGCTTCAGCAAGGATTGGTCCTTCTACCTGCTGTACTACACC | | |
| | GAGTTCACCCCTACAGAGAAGGACGAGTACGCCTGCAGAGTGAA | | |
| | CCACGTGACCCTGAGCCAGCCTAAGATCGTGAAGTGGGATAGAG | | |
| | ATATGGGCGGCGGAGGCTCTGGAGGCGGAGGCTCTGGAGGAGGC | | |
| | GGCTCCGGCGGAGGCGGCTCCGGCAGCCACTCCATGCGATATTT | | |
| | TTTTACCAGCGTATCTCGACCAGGCAGAGGCGAGCCCCGCTTCA | | |
| | TAGCGGTTGGCTACGTTGATGACACCCAATTTGTAAGATTCGAC | | |
| | TCAGATGCTGCGTCACAGAGAATGGAGCCAAGAGCCCCCTGGAT | | |
| | AGAACAGGAGGGTCCTGAATATTGGGATGGTGAGACAAGAAAGG | | |
| | TGAAAGCACATTCTCAGACTCATAGGGTAGATTTGGGTACTTTG | | |
| | AGAGGGTATTACAACCAGTCTGAAGCCGGTAGTCACACTGTTCA | | |
| | ACGCATGTACGGTTGTGATGTCGGATCAGATTGGCGCTTTCTCA | | |
| | GAGGGTATCACCAATATGCTTACGACGGGAAAGATTATATTGCG | | |
| | TTGAAGGAGGACCTCAGGAGTTGGACCGCAGCAGATATGGCCGC | | |
| | ACAGACTACGAAGCACAAGTGGGAGGCGGCCCATGTGGCGGAGC | | |
| | AACTGCGAGCGTATCTTGAGGGCACATGCGTAGAGTGGCTTAGG | | |
| | AGATATCTGGAGAATGGGAAGGAAACTTTGCAACGCACAGACGC | | |
| | TCCAAAGACGCACATGACTCATCATGCAGTGTCCGATCACGAAG | | |
| | CTACTCTCAGGTGTTGGGCTTTGTCATTCTATCCGGCTGAGATC | | |
| | ACCCTCACGTGGCAGCGGGATGGAGAAGATCAAACACAAGACAC | | |
| | AGAGCTTGTAGAGACACGCCCCGCTGGGGACGGCACCTTCCAAA | | |
| | AGTGGGCCGCTGTTGTTGTACCCTCAGGACAGGAACAGCGCTAT | | |
| | ACGTGCCACGTGCAGCATGAGGGCCTGCCGAAACCGCTGACACT | | |
| | TCGATGGGAGCCATCTTCTCAACCCACCATACCAATCGTGGGAA | | |
| | TCATAGCTGGATTGGTTCTTTTTGGTGCCGTAATCACCGGTGCT | | |
| | GTGGTTGCGGCGGTAATGTGGCGGCGCAAGAGCTCCGACAGAAA | | |
| | GGGTGGTAGCTATAGTCAGGCCGCTTCCAGTGACTCCGCACAGG | | |
| | GTAGCGACGTATCACTGACAGCGTGCAAGGTA | | |
| B2M/HLA- | ATGAGCCGGAGCGTGGCTCTGGCCGTGCTGGCCCTATTGTCTCT | 511 | single |
| A*02 | GAGCGGACTGGAAGCCATCCAGAGAACCCCAAAGATCCAAGTGT | | chain |
| (D227K/ | ACAGCAGACACCCTGCCGAGAACGGCAAGAGCAATTTCCTGAAC | | dimer |
| T228A) | TGCTACGTGTCCGGCTTTCACCCCAGCGACATCGAGGTGGATCT | | |
| | GCTGAAGAACGGCGAGAGAATCGAGAAGGTCGAACACAGCGATC | | |
| | TGAGCTTCAGCAAGGATTGGTCCTTCTACCTGCTGTACTACACC | | |
| | GAGTTCACCCCTACAGAGAAGGACGAGTACGCCTGCAGAGTGAA | | |
| | CCACGTGACCCTGAGCCAGCCTAAGATCGTGAAGTGGGATAGAG | | |
| | ATATGGGCGGCGGAGGCTCTGGAGGCGGAGGCTCTGGAGGAGGC | | |
| | GGCTCCGGCGGAGGCGGCTCCGGCAGCCACTCCATGCGATATTT | | |
| | TTTTACCAGCGTATCTCGACCAGGCAGAGGCGAGCCCCGCTTCA | | |
| | TAGCGGTTGGCTACGTTGATGACACCCAATTTGTAAGATTCGAC | | |
| | TCAGATGCTGCGTCACAGAGAATGGAGCCAAGAGCCCCCTGGAT | | |
| | AGAACAGGAGGGTCCTGAATATTGGGATGGTGAGACAAGAAAGG | | |
| | TGAAAGCACATTCTCAGACTCATAGGGTAGATTTGGGTACTTTG | | |
| | AGAGGGTATTACAACCAGTCTGAAGCCGGTAGTCACACTGTTCA | | |
| | ACGCATGTACGGTTGTGATGTCGGATCAGATTGGCGCTTTCTCA | | |
| | GAGGGTATCACCAATATGCTTACGACGGGAAAGATTATATTGCG | | |
| | TTGAAGGAGGACCTCAGGAGTTGGACCGCAGCAGATATGGCCGC | | |
| | ACAGACTACGAAGCACAAGTGGGAGGCGGCCCATGTGGCGGAGC | | |
| | AACTGCGAGCGTATCTTGAGGGCACATGCGTAGAGTGGCTTAGG | | |
| | AGATATCTGGAGAATGGGAAGGAAACTTTGCAACGCACAGACGC | | |
| | TCCAAAGACGCACATGACTCATCATGCAGTGTCCGATCACGAAG | | |
| | CTACTCTCAGGTGTTGGGCTTTGTCATTCTATCCGGCTGAGATC | | |
| | ACCCTCACGTGGCAGCGGGATGGAGAAGATCAAACACAAAAAGC | | |
| | GGAGCTTGTAGAGACACGCCCCGCTGGGGACGGCACCTTCCAAA | | |
| | AGTGGGCCGCTGTTGTTGTACCCTCAGGACAGGAACAGCGCTAT | | |
| | ACGTGCCACGTGCAGCATGAGGGCCTGCCGAAACCGCTGACACT | | |
| | TCGATGGGAGCCATCTTCTCAACCCACCATACCAATCGTGGGAA | | |
| | TCATAGCTGGATTGGTTCTTTTTGGTGCCGTAATCACCGGTGCT | | |
| | GTGGTTGCGGCGGTAATGTGGCGGCGCAAGAGCTCCGACAGAAA | | |
| | GGGTGGTAGCTATAGTCAGGCCGCTTCCAGTGACTCCGCACAGG | | |
| | GTAGCGACGTATCACTGACAGCGTGCAAGGTA | | |
| B2M/HLA- | ATGAGCCGGAGCGTGGCTCTGGCCGTGCTGGCCCTATTGTCTCT | 512 | single |
| A*02 | GAGCGGACTGGAAGCCATCCAGAGAACCCCAAAGATCCAAGTGT | | chain |
| (A245V) | ACAGCAGACACCCTGCCGAGAACGGCAAGAGCAATTTCCTGAAC | | dimer |
| | TGCTACGTGTCCGGCTTTCACCCCAGCGACATCGAGGTGGATCT | | |
| | GCTGAAGAACGGCGAGAGAATCGAGAAGGTCGAACACAGCGATC | | |
| | TGAGCTTCAGCAAGGATTGGTCCTTCTACCTGCTGTACTACACC | | |
| | GAGTTCACCCCTACAGAGAAGGACGAGTACGCCTGCAGAGTGAA | | |
| | CCACGTGACCCTGAGCCAGCCTAAGATCGTGAAGTGGGATAGAG | | |
| | ATATGGGCGGCGGAGGCTCTGGAGGCGGAGGCTCTGGAGGAGGC | | |
| | GGCTCCGGCGGAGGCGGCTCCGGCAGCCACTCCATGCGATATTT | | |
| | TTTTACCAGCGTATCTCGACCAGGCAGAGGCGAGCCCCGCTTCA | | |
| | TAGCGGTTGGCTACGTTGATGACACCCAATTTGTAAGATTCGAC | | |
| | TCAGATGCTGCGTCACAGAGAATGGAGCCAAGAGCCCCCTGGAT | | |
| | AGAACAGGAGGGTCCTGAATATTGGGATGGTGAGACAAGAAAGG | | |
| | TGAAAGCACATTCTCAGACTCATAGGGTAGATTTGGGTACTTTG | | |
| | AGAGGGTATTACAACCAGTCTGAAGCCGGTAGTCACACTGTTCA | | |
| | ACGCATGTACGGTTGTGATGTCGGATCAGATTGGCGCTTTCTCA | | |
| | GAGGGTATCACCAATATGCTTACGACGGGAAAGATTATATTGCG | | |
| | TTGAAGGAGGACCTCAGGAGTTGGACCGCAGCAGATATGGCCGC | | |
| | ACAGACTACGAAGCACAAGTGGGAGGCGGCCCATGTGGCGGAGC | | |
| | AACTGCGAGCGTATCTTGAGGGCACATGCGTAGAGTGGCTTAGG | | |
| | AGATATCTGGAGAATGGGAAGGAAACTTTGCAACGCACAGACGC | | |
| | TCCAAAGACGCACATGACTCATCATGCAGTGTCCGATCACGAAG | | |
| | CTACTCTCAGGTGTTGGGCTTTGTCATTCTATCCGGCTGAGATC | | |
| | ACCCTCACGTGGCAGCGGGATGGAGAAGATCAAACACAAGACAC | | |
| | AGAGCTTGTAGAGACACGCCCCGCTGGGGACGGCACCTTCCAAA | | |
| | AGTGGGTGGCTGTTGTTGTACCCTCAGGACAGGAACAGCGCTAT | | |
| | ACGTGCCACGTGCAGCATGAGGGCCTGCCGAAACCGCTGACACT | | |
| | TCGATGGGAGCCATCTTCTCAACCCACCATACCAATCGTGGGAA | | |
| | TCATAGCTGGATTGGTTCTTTTTGGTGCCGTAATCACCGGTGCT | | |
| | GTGGTTGCGGCGGTAATGTGGCGGCGCAAGAGCTCCGACAGAAA | | |
| | GGGTGGTAGCTATAGTCAGGCCGCTTCCAGTGACTCCGCACAGG | | |
| | GTAGCGACGTATCACTGACAGCGTGCAAGGTA | | |
| B2M/HLA- | ATGAGCCGGAGCGTGGCTCTGGCCGTGCTGGCCCTATTGTCTCT | 513 | single |
| A*02 | GAGCGGACTGGAAGCCATCCAGAGAACCCCAAAGATCCAAGTGT | | chain |
| (D227K/ | ACAGCAGACACCCTGCCGAGAACGGCAAGAGCAATTTCCTGAAC | | dimer |
| T228A/A245V) | TGCTACGTGTCCGGCTTTCACCCCAGCGACATCGAGGTGGATCT | | |
| | GCTGAAGAACGGCGAGAGAATCGAGAAGGTCGAACACAGCGATC | | |
| | TGAGCTTCAGCAAGGATTGGTCCTTCTACCTGCTGTACTACACC | | |
| | GAGTTCACCCCTACAGAGAAGGACGAGTACGCCTGCAGAGTGAA | | |
| | CCACGTGACCCTGAGCCAGCCTAAGATCGTGAAGTGGGATAGAG | | |
| | ATATGGGCGGCGGAGGCTCTGGAGGCGGAGGCTCTGGAGGAGGC | | |
| | GGCTCCGGCGGAGGCGGCTCCGGCAGCCACTCCATGCGATATTT | | |
| | TTTTACCAGCGTATCTCGACCAGGCAGAGGCGAGCCCCGCTTCA | | |
| | TAGCGGTTGGCTACGTTGATGACACCCAATTTGTAAGATTCGAC | | |
| | TCAGATGCTGCGTCACAGAGAATGGAGCCAAGAGCCCCCTGGAT | | |
| | AGAACAGGAGGGTCCTGAATATTGGGATGGTGAGACAAGAAAGG | | |
| | TGAAAGCACATTCTCAGACTCATAGGGTAGATTTGGGTACTTTG | | |
| | AGAGGGTATTACAACCAGTCTGAAGCCGGTAGTCACACTGTTCA | | |
| | ACGCATGTACGGTTGTGATGTCGGATCAGATTGGCGCTTTCTCA | | |
| | GAGGGTATCACCAATATGCTTACGACGGGAAAGATTATATTGCG | | |
| | TTGAAGGAGGACCTCAGGAGTTGGACCGCAGCAGATATGGCCGC | | |
| | ACAGACTACGAAGCACAAGTGGGAGGCGGCCCATGTGGCGGAGC | | |
| | AACTGCGAGCGTATCTTGAGGGCACATGCGTAGAGTGGCTTAGG | | |
| | AGATATCTGGAGAATGGGAAGGAAACTTTGCAACGCACAGACGC | | |
| | TCCAAAGACGCACATGACTCATCATGCAGTGTCCGATCACGAAG | | |
| | CTACTCTCAGGTGTTGGGCTTTGTCATTCTATCCGGCTGAGATC | | |
| | ACCCTCACGTGGCAGCGGGATGGAGAAGATCAAACACAAAAAGC | | |
| | GGAGCTTGTAGAGACACGCCCCGCTGGGGACGGCACCTTCCAAA | | |
| | AGTGGGTGGCTGTTGTTGTACCCTCAGGACAGGAACAGCGCTAT | | |
| | ACGTGCCACGTGCAGCATGAGGGCCTGCCGAAACCGCTGACACT | | |
| | TCGATGGGAGCCATCTTCTCAACCCACCATACCAATCGTGGGAA | | |
| | TCATAGCTGGATTGGTTCTTTTTGGTGCCGTAATCACCGGTGCT | | |
| | GTGGTTGCGGCGGTAATGTGGCGGCGCAAGAGCTCCGACAGAAA | | |
| | GGGTGGTAGCTATAGTCAGGCCGCTTCCAGTGACTCCGCACAGG | | |
| | GTAGCGACGTATCACTGACAGCGTGCAAGGTA | | |
| B2M(K58E)/ | ATGAGCCGGAGCGTGGCTCTGGCCGTGCTGGCCCTATTGTCTCT | 514 | single |
| HLA-A*02 | GAGCGGACTGGAAGCCATCCAGAGAACCCCAAAGATCCAAGTGT | | chain |
| | ACAGCAGACACCCTGCCGAGAACGGCAAGAGCAATTTCCTGAAC | | dimer |
| | TGCTACGTGTCCGGCTTTCACCCCAGCGACATCGAGGTGGATCT | | |
| | GCTGAAGAACGGCGAGAGAATCGAGAAGGTCGAACACAGCGATC | | |
| | TGAGCTTCAGCGAAGATTGGTCCTTCTACCTGCTGTACTACACC | | |
| | GAGTTCACCCCTACAGAGAAGGACGAGTACGCCTGCAGAGTGAA | | |
| | CCACGTGACCCTGAGCCAGCCTAAGATCGTGAAGTGGGATAGAG | | |
| | ATATGGGCGGCGGAGGCTCTGGAGGCGGAGGCTCTGGAGGAGGC | | |
| | GGCTCCGGCGGAGGCGGCTCCGGCAGCCACTCCATGCGATATTT | | |
| | TTTTACCAGCGTATCTCGACCAGGCAGAGGCGAGCCCCGCTTCA | | |
| | TAGCGGTTGGCTACGTTGATGACACCCAATTTGTAAGATTCGAC | | |
| | TCAGATGCTGCGTCACAGAGAATGGAGCCAAGAGCCCCCTGGAT | | |
| | AGAACAGGAGGGTCCTGAATATTGGGATGGTGAGACAAGAAAGG | | |
| | TGAAAGCACATTCTCAGACTCATAGGGTAGATTTGGGTACTTTG | | |
| | AGAGGGTATTACAACCAGTCTGAAGCCGGTAGTCACACTGTTCA | | |
| | ACGCATGTACGGTTGTGATGTCGGATCAGATTGGCGCTTTCTCA | | |
| | GAGGGTATCACCAATATGCTTACGACGGGAAAGATTATATTGCG | | |
| | TTGAAGGAGGACCTCAGGAGTTGGACCGCAGCAGATATGGCCGC | | |
| | ACAGACTACGAAGCACAAGTGGGAGGCGGCCCATGTGGCGGAGC | | |
| | AACTGCGAGCGTATCTTGAGGGCACATGCGTAGAGTGGCTTAGG | | |
| | AGATATCTGGAGAATGGGAAGGAAACTTTGCAACGCACAGACGC | | |
| | TCCAAAGACGCACATGACTCATCATGCAGTGTCCGATCACGAAG | | |
| | CTACTCTCAGGTGTTGGGCTTTGTCATTCTATCCGGCTGAGATC | | |
| | ACCCTCACGTGGCAGCGGGATGGAGAAGATCAAACACAAGACAC | | |
| | AGAGCTTGTAGAGACACGCCCCGCTGGGGACGGCACCTTCCAAA | | |
| | AGTGGGCCGCTGTTGTTGTACCCTCAGGACAGGAACAGCGCTAT | | |
| | ACGTGCCACGTGCAGCATGAGGGCCTGCCGAAACCGCTGACACT | | |
| | TCGATGGGAGCCATCTTCTCAACCCACCATACCAATCGTGGGAA | | |
| | TCATAGCTGGATTGGTTCTTTTTGGTGCCGTAATCACCGGTGCT | | |
| | GTGGTTGCGGCGGTAATGTGGCGGCGCAAGAGCTCCGACAGAAA | | |
| | GGGTGGTAGCTATAGTCAGGCCGCTTCCAGTGACTCCGCACAGG | | |
| | GTAGCGACGTATCACTGACAGCGTGCAAGGTA | | |
| B2M(K58E)/ | ATGAGCCGGAGCGTGGCTCTGGCCGTGCTGGCCCTATTGTCTCT | 515 | single |
| HLA- | GAGCGGACTGGAAGCCATCCAGAGAACCCCAAAGATCCAAGTGT | | chain |
| A*02 | ACAGCAGACACCCTGCCGAGAACGGCAAGAGCAATTTCCTGAAC | | dimer |
| (D227K/T228A) | TGCTACGTGTCCGGCTTTCACCCCAGCGACATCGAGGTGGATCT | | |
| | GCTGAAGAACGGCGAGAGAATCGAGAAGGTCGAACACAGCGATC | | |
| | TGAGCTTCAGCGAAGATTGGTCCTTCTACCTGCTGTACTACACC | | |
| | GAGTTCACCCCTACAGAGAAGGACGAGTACGCCTGCAGAGTGAA | | |
| | CCACGTGACCCTGAGCCAGCCTAAGATCGTGAAGTGGGATAGAG | | |
| | ATATGGGCGGCGGAGGCTCTGGAGGCGGAGGCTCTGGAGGAGGC | | |
| | GGCTCCGGCGGAGGCGGCTCCGGCAGCCACTCCATGCGATATTT | | |
| | TTTTACCAGCGTATCTCGACCAGGCAGAGGCGAGCCCCGCTTCA | | |
| | TAGCGGTTGGCTACGTTGATGACACCCAATTTGTAAGATTCGAC | | |
| | TCAGATGCTGCGTCACAGAGAATGGAGCCAAGAGCCCCCTGGAT | | |
| | AGAACAGGAGGGTCCTGAATATTGGGATGGTGAGACAAGAAAGG | | |
| | TGAAAGCACATTCTCAGACTCATAGGGTAGATTTGGGTACTTTG | | |
| | AGAGGGTATTACAACCAGTCTGAAGCCGGTAGTCACACTGTTCA | | |
| | ACGCATGTACGGTTGTGATGTCGGATCAGATTGGCGCTTTCTCA | | |
| | GAGGGTATCACCAATATGCTTACGACGGGAAAGATTATATTGCG | | |
| | TTGAAGGAGGACCTCAGGAGTTGGACCGCAGCAGATATGGCCGC | | |
| | ACAGACTACGAAGCACAAGTGGGAGGCGGCCCATGTGGCGGAGC | | |
| | AACTGCGAGCGTATCTTGAGGGCACATGCGTAGAGTGGCTTAGG | | |
| | AGATATCTGGAGAATGGGAAGGAAACTTTGCAACGCACAGACGC | | |
| | TCCAAAGACGCACATGACTCATCATGCAGTGTCCGATCACGAAG | | |
| | CTACTCTCAGGTGTTGGGCTTTGTCATTCTATCCGGCTGAGATC | | |
| | ACCCTCACGTGGCAGCGGGATGGAGAAGATCAAACACAAAAAGC | | |
| | GGAGCTTGTAGAGACACGCCCCGCTGGGGACGGCACCTTCCAAA | | |
| | AGTGGGCCGCTGTTGTTGTACCCTCAGGACAGGAACAGCGCTAT | | |
| | ACGTGCCACGTGCAGCATGAGGGCCTGCCGAAACCGCTGACACT | | |
| | TCGATGGGAGCCATCTTCTCAACCCACCATACCAATCGTGGGAA | | |
| | TCATAGCTGGATTGGTTCTTTTTGGTGCCGTAATCACCGGTGCT | | |
| | GTGGTTGCGGCGGTAATGTGGCGGCGCAAGAGCTCCGACAGAAA | | |
| | GGGTGGTAGCTATAGTCAGGCCGCTTCCAGTGACTCCGCACAGG | | |
| | GTAGCGACGTATCACTGACAGCGTGCAAGGTA | | |
| B2M(K58E)/ | ATGAGCCGGAGCGTGGCTCTGGCCGTGCTGGCCCTATTGTCTCT | 516 | single |
| HLA- | GAGCGGACTGGAAGCCATCCAGAGAACCCCAAAGATCCAAGTGT | | chain |
| A*02(A245V) | ACAGCAGACACCCTGCCGAGAACGGCAAGAGCAATTTCCTGAAC | | dimer |
| | TGCTACGTGTCCGGCTTTCACCCCAGCGACATCGAGGTGGATCT | | |
| | GCTGAAGAACGGCGAGAGAATCGAGAAGGTCGAACACAGCGATC | | |
| | TGAGCTTCAGCGAAGATTGGTCCTTCTACCTGCTGTACTACACC | | |
| | GAGTTCACCCCTACAGAGAAGGACGAGTACGCCTGCAGAGTGAA | | |
| | CCACGTGACCCTGAGCCAGCCTAAGATCGTGAAGTGGGATAGAG | | |
| | ATATGGGCGGCGGAGGCTCTGGAGGCGGAGGCTCTGGAGGAGGC | | |
| | GGCTCCGGCGGAGGCGGCTCCGGCAGCCACTCCATGCGATATTT | | |
| | TTTTACCAGCGTATCTCGACCAGGCAGAGGCGAGCCCCGCTTCA | | |
| | TAGCGGTTGGCTACGTTGATGACACCCAATTTGTAAGATTCGAC | | |
| | TCAGATGCTGCGTCACAGAGAATGGAGCCAAGAGCCCCCTGGAT | | |
| | AGAACAGGAGGGTCCTGAATATTGGGATGGTGAGACAAGAAAGG | | |
| | TGAAAGCACATTCTCAGACTCATAGGGTAGATTTGGGTACTTTG | | |
| | AGAGGGTATTACAACCAGTCTGAAGCCGGTAGTCACACTGTTCA | | |
| | ACGCATGTACGGTTGTGATGTCGGATCAGATTGGCGCTTTCTCA | | |
| | GAGGGTATCACCAATATGCTTACGACGGGAAAGATTATATTGCG | | |
| | TTGAAGGAGGACCTCAGGAGTTGGACCGCAGCAGATATGGCCGC | | |
| | ACAGACTACGAAGCACAAGTGGGAGGCGGCCCATGTGGCGGAGC | | |
| | AACTGCGAGCGTATCTTGAGGGCACATGCGTAGAGTGGCTTAGG | | |
| | AGATATCTGGAGAATGGGAAGGAAACTTTGCAACGCACAGACGC | | |
| | TCCAAAGACGCACATGACTCATCATGCAGTGTCCGATCACGAAG | | |
| | CTACTCTCAGGTGTTGGGCTTTGTCATTCTATCCGGCTGAGATC | | |
| | ACCCTCACGTGGCAGCGGGATGGAGAAGATCAAACACAAGACAC | | |
| | AGAGCTTGTAGAGACACGCCCCGCTGGGGACGGCACCTTCCAAA | | |
| | AGTGGGTGGCTGTTGTTGTACCCTCAGGACAGGAACAGCGCTAT | | |
| | ACGTGCCACGTGCAGCATGAGGGCCTGCCGAAACCGCTGACACT | | |
| | TCGATGGGAGCCATCTTCTCAACCCACCATACCAATCGTGGGAA | | |
| | TCATAGCTGGATTGGTTCTTTTTGGTGCCGTAATCACCGGTGCT | | |
| | GTGGTTGCGGCGGTAATGTGGCGGCGCAAGAGCTCCGACAGAAA | | |
| | GGGTGGTAGCTATAGTCAGGCCGCTTCCAGTGACTCCGCACAGG | | |
| | GTAGCGACGTATCACTGACAGCGTGCAAGGTA | | |
| B2M(K58E)/ | ATGAGCCGGAGCGTGGCTCTGGCCGTGCTGGCCCTATTGTCTCT | 517 | single |
| HLA- | GAGCGGACTGGAAGCCATCCAGAGAACCCCAAAGATCCAAGTGT | | chain |
| A*02 | ACAGCAGACACCCTGCCGAGAACGGCAAGAGCAATTTCCTGAAC | | dimer |
| (D227K/ | TGCTACGTGTCCGGCTTTCACCCCAGCGACATCGAGGTGGATCT | | |
| T228A/A245V) | GCTGAAGAACGGCGAGAGAATCGAGAAGGTCGAACACAGCGATC | | |
| | TGAGCTTCAGCGAAGATTGGTCCTTCTACCTGCTGTACTACACC | | |
| | GAGTTCACCCCTACAGAGAAGGACGAGTACGCCTGCAGAGTGAA | | |
| | CCACGTGACCCTGAGCCAGCCTAAGATCGTGAAGTGGGATAGAG | | |
| | ATATGGGCGGCGGAGGCTCTGGAGGCGGAGGCTCTGGAGGAGGC | | |
| | GGCTCCGGCGGAGGCGGCTCCGGCAGCCACTCCATGCGATATTT | | |
| | TTTTACCAGCGTATCTCGACCAGGCAGAGGCGAGCCCCGCTTCA | | |
| | TAGCGGTTGGCTACGTTGATGACACCCAATTTGTAAGATTCGAC | | |
| | TCAGATGCTGCGTCACAGAGAATGGAGCCAAGAGCCCCCTGGAT | | |
| | AGAACAGGAGGGTCCTGAATATTGGGATGGTGAGACAAGAAAGG | | |
| | TGAAAGCACATTCTCAGACTCATAGGGTAGATTTGGGTACTTTG | | |
| | AGAGGGTATTACAACCAGTCTGAAGCCGGTAGTCACACTGTTCA | | |
| | ACGCATGTACGGTTGTGATGTCGGATCAGATTGGCGCTTTCTCA | | |
| | GAGGGTATCACCAATATGCTTACGACGGGAAAGATTATATTGCG | | |
| | TTGAAGGAGGACCTCAGGAGTTGGACCGCAGCAGATATGGCCGC | | |
| | ACAGACTACGAAGCACAAGTGGGAGGCGGCCCATGTGGCGGAGC | | |
| | AACTGCGAGCGTATCTTGAGGGCACATGCGTAGAGTGGCTTAGG | | |
| | AGATATCTGGAGAATGGGAAGGAAACTTTGCAACGCACAGACGC | | |
| | TCCAAAGACGCACATGACTCATCATGCAGTGTCCGATCACGAAG | | |
| | CTACTCTCAGGTGTTGGGCTTTGTCATTCTATCCGGCTGAGATC | | |
| | ACCCTCACGTGGCAGCGGGATGGAGAAGATCAAACACAAAAAGC | | |
| | GGAGCTTGTAGAGACACGCCCCGCTGGGGACGGCACCTTCCAAA | | |
| | AGTGGGTGGCTGTTGTTGTACCCTCAGGACAGGAACAGCGCTAT | | |
| | ACGTGCCACGTGCAGCATGAGGGCCTGCCGAAACCGCTGACACT | | |
| | TCGATGGGAGCCATCTTCTCAACCCACCATACCAATCGTGGGAA | | |
| | TCATAGCTGGATTGGTTCTTTTTGGTGCCGTAATCACCGGTGCT | | |
| | GTGGTTGCGGCGGTAATGTGGCGGCGCAAGAGCTCCGACAGAAA | | |
| | GGGTGGTAGCTATAGTCAGGCCGCTTCCAGTGACTCCGCACAGG | | |
| | GTAGCGACGTATCACTGACAGCGTGCAAGGTA | | |
| B2M/HLA- | ATGAGCCGGAGCGTGGCTCTGGCCGTGCTGGCCCTATTGTCTCT | 518 | single |
| A*02- | GAGCGGACTGGAAGCCATCCAGAGAACCCCAAAGATCCAAGTGT | | chain |
| CD4TM | ACAGCAGACACCCTGCCGAGAACGGCAAGAGCAATTTCCTGAAC | | dimer |
| | TGCTACGTGTCCGGCTTTCACCCCAGCGACATCGAGGTGGATCT | | |
| | GCTGAAGAACGGCGAGAGAATCGAGAAGGTCGAACACAGCGATC | | |
| | TGAGCTTCAGCAAGGATTGGTCCTTCTACCTGCTGTACTACACC | | |
| | GAGTTCACCCCTACAGAGAAGGACGAGTACGCCTGCAGAGTGAA | | |
| | CCACGTGACCCTGAGCCAGCCTAAGATCGTGAAGTGGGATAGAG | | |
| | ATATGGGCGGCGGAGGCTCTGGAGGCGGAGGCTCTGGAGGAGGC | | |
| | GGCTCCGGCGGAGGCGGCTCCGGCAGCCACTCCATGCGATATTT | | |
| | TTTTACCAGCGTATCTCGACCAGGCAGAGGCGAGCCCCGCTTCA | | |
| | TAGCGGTTGGCTACGTTGATGACACCCAATTTGTAAGATTCGAC | | |
| | TCAGATGCTGCGTCACAGAGAATGGAGCCAAGAGCCCCCTGGAT | | |
| | AGAACAGGAGGGTCCTGAATATTGGGATGGTGAGACAAGAAAGG | | |
| | TGAAAGCACATTCTCAGACTCATAGGGTAGATTTGGGTACTTTG | | |
| | AGAGGGTATTACAACCAGTCTGAAGCCGGTAGTCACACTGTTCA | | |
| | ACGCATGTACGGTTGTGATGTCGGATCAGATTGGCGCTTTCTCA | | |
| | GAGGGTATCACCAATATGCTTACGACGGGAAAGATTATATTGCG | | |
| | TTGAAGGAGGACCTCAGGAGTTGGACCGCAGCAGATATGGCCGC | | |
| | ACAGACTACGAAGCACAAGTGGGAGGCGGCCCATGTGGCGGAGC | | |
| | AACTGCGAGCGTATCTTGAGGGCACATGCGTAGAGTGGCTTAGG | | |
| | AGATATCTGGAGAATGGGAAGGAAACTTTGCAACGCACAGACGC | | |
| | TCCAAAGACGCACATGACTCATCATGCAGTGTCCGATCACGAAG | | |
| | CTACTCTCAGGTGTTGGGCTTTGTCATTCTATCCGGCTGAGATC | | |
| | ACCCTCACGTGGCAGCGGGATGGAGAAGATCAAACACAAGACAC | | |
| | AGAGCTTGTAGAGACACGCCCCGCTGGGGACGGCACCTTCCAAA | | |
| | AGTGGGCCGCTGTTGTTGTACCCTCAGGACAGGAACAGCGCTAT | | |
| | ACGTGCCACGTGCAGCATGAGGGCCTGCCGAAACCGCTGACACT | | |
| | TCGATGGGAGCCATCTTCTCAACCCACCATACCAATCATGGCCC | | |
| | TGATCGTGCTGGGCGGCGTGGCCGGCCTGCTGCTGTTCATCGGC | | |
| | CTGGGCATTTTTTTCTGCGTGCGGTGC | | |
| B2M/HLA- | ATGAGCCGGAGCGTGGCTCTGGCCGTGCTGGCCCTATTGTCTCT | 519 | single |
| A*02(D227K/ | GAGCGGACTGGAAGCCATCCAGAGAACCCCAAAGATCCAAGTGT | | chain |
| T228A)- | ACAGCAGACACCCTGCCGAGAACGGCAAGAGCAATTTCCTGAAC | | dimer |
| CD4TM | TGCTACGTGTCCGGCTTTCACCCCAGCGACATCGAGGTGGATCT | | |
| | GCTGAAGAACGGCGAGAGAATCGAGAAGGTCGAACACAGCGATC | | |
| | TGAGCTTCAGCAAGGATTGGTCCTTCTACCTGCTGTACTACACC | | |
| | GAGTTCACCCCTACAGAGAAGGACGAGTACGCCTGCAGAGTGAA | | |
| | CCACGTGACCCTGAGCCAGCCTAAGATCGTGAAGTGGGATAGAG | | |
| | ATATGGGCGGCGGAGGCTCTGGAGGCGGAGGCTCTGGAGGAGGC | | |
| | GGCTCCGGCGGAGGCGGCTCCGGCAGCCACTCCATGCGATATTT | | |
| | TTTTACCAGCGTATCTCGACCAGGCAGAGGCGAGCCCCGCTTCA | | |
| | TAGCGGTTGGCTACGTTGATGACACCCAATTTGTAAGATTCGAC | | |
| | TCAGATGCTGCGTCACAGAGAATGGAGCCAAGAGCCCCCTGGAT | | |
| | AGAACAGGAGGGTCCTGAATATTGGGATGGTGAGACAAGAAAGG | | |
| | TGAAAGCACATTCTCAGACTCATAGGGTAGATTTGGGTACTTTG | | |
| | AGAGGGTATTACAACCAGTCTGAAGCCGGTAGTCACACTGTTCA | | |
| | ACGCATGTACGGTTGTGATGTCGGATCAGATTGGCGCTTTCTCA | | |
| | GAGGGTATCACCAATATGCTTACGACGGGAAAGATTATATTGCG | | |
| | TTGAAGGAGGACCTCAGGAGTTGGACCGCAGCAGATATGGCCGC | | |
| | ACAGACTACGAAGCACAAGTGGGAGGCGGCCCATGTGGCGGAGC | | |
| | AACTGCGAGCGTATCTTGAGGGCACATGCGTAGAGTGGCTTAGG | | |
| | AGATATCTGGAGAATGGGAAGGAAACTTTGCAACGCACAGACGC | | |
| | TCCAAAGACGCACATGACTCATCATGCAGTGTCCGATCACGAAG | | |
| | CTACTCTCAGGTGTTGGGCTTTGTCATTCTATCCGGCTGAGATC | | |
| | ACCCTCACGTGGCAGCGGGATGGAGAAGATCAAACACAAAAAGC | | |
| | GGAGCTTGTAGAGACACGCCCCGCTGGGGACGGCACCTTCCAAA | | |
| | AGTGGGCCGCTGTTGTTGTACCCTCAGGACAGGAACAGCGCTAT | | |
| | ACGTGCCACGTGCAGCATGAGGGCCTGCCGAAACCGCTGACACT | | |
| | TCGATGGGAGCCATCTTCTCAACCCACCATACCAATCATGGCCC | | |
| | TGATCGTGCTGGGCGGCGTGGCCGGCCTGCTGCTGTTCATCGGC | | |
| | CTGGGCATTTTTTTCTGCGTGCGGTGC | | |

[0477] Lentiviral vectors were prepared containing polynucleotides encoding the following HLA-A2 single chain dimers (see Tables 8A and 8B): B2M/HLA-A*02; B2M/HLA-A*02 (D227K/T228A); B2M/HLA-A*02 (A245V); B2M/HLA-A*02 (D227K/T228A/A245V); B2M (K58E)/HLA-A*02; B2M (K58E)/HLA-A*02 (D227K/T228A); B2M (K58E)/HLA-A*02 (A245V); and B2M (K58E)/HLA-A*02 (D227K/T228A/A245V). Expression of the HLA-A2 single-chain dimers was controlled using an MND promoter (AATGAAAGACCCCACCTGTAGGTTTGGCAAGCTAGGATCAAGGTTAGGAACAGAGAGACAGCAG AATATGGGCCAAACAGGATATCTGTGGTAAGCAGTTCCTGCCCCGGCTCAGGGCCAAGAACAGT TGGAACAGCAGAATATGGGCCAAACAGGATATCTGTGGTAAGCAGTTCCTGCCCCGGCTCAGGG CCAAGAACAGATGGTCCCCAGATGCGGTCCCGCCCTCAGCAGTTTCTAGAGAACCATCAGATGT TTCCAGGGTGCCCCAAGGACCTGAAATGACCCTGTGCCTTATTTGAACTAACCAATCAGTTCGC TTCTCGCTTCTGTTCGCGCGCTTCTGCTCCCCGAGCTCAATAAAAGAGCCCACAACCCCTCACT CGGC (SEQ ID NO: 628)). To evaluate the efficiency of the lentiviral vectors, B2M KO T cells prepared as described above using base editing were contacted with the lentiviral vectors (i.e., transduced using the lentiviral vectors) and expression of the HLA-A2 single-chain dimers in the cells was then evaluated using flow cytometry (FIG. 8). All of the lentiviral vectors were effective at introducing the polynucleotides into the B2M KO T cells and the transduced B2M KO T cells expressed and surface-displayed the encoded polypeptides.

[0478] Next, experiments were undertaken to evaluate relative levels of activation of alloreactive T cells by the transduced B2M KO T cells expressing the HLA-A2 single chain dimers (FIGS. 9A-9C). The alloreactive T cells (the effector (E) cells) were co-cultured at an effector-to-target cell ratio of 1:1 with the transduced cells (the target (T) cells) for 24 hours, after which the cell culture medium was centrifuged and the supernatant was evaluated for levels of the following markers of activation of the alloreactive T cells: granzyme B (BZMB) (FIG. 9A), IFN-gamma (FIG. 9B), and TNF-alpha (FIG. 9C). Levels of the markers were measured relative to levels measured for B2M KO T cells transduced with an HLA-A2 single chain dimer containing wild type B2M and HLA-A2 domains. It was found that transduced cells expressing HLA-A2 single chain dimers containing a B2M (K58E) domain and/or an HLA-A2 (D227K/T228A), HLA-A2 (A245V), or HLA-A2 (D227K/T228A/A245V) domain showed reduced levels of alloreactive T cell activation relative to cells expressing HLA-A2 single chain dimers containing B2M (WT) and HLA-A2 (WT) domains, as shown by reduced levels of alloreactive T cell cytokine production in co-culture.

[0479] A cytotoxicity assay was undertaken to evaluate whether the transduced B2M KO T cells expressing the HLA-A2 single chain dimers were protected from alloreactive T cell lysis, and to what degree (FIGS. 10A and 10B). The B2M KO T cells expressing the HLA-A2 single chain dimers (i.e., B2M/HLA-A*02; B2M/HLA-A*02 (D227K/T228A); B2M/HLA-A*02 (A245V); B2M/HLA-A*02 (D227K/T228A/A245V); B2M (K58E)/HLA-A*02; B2M (K58E)/HLA-A*02 (D227K/T228A); B2M (K58E)/HLA-A*02 (A245V); and B2M (K58E)/HLA-A*02 (D227K/T228A/A245V)) were co-cultured for 48 hours with HLA-A2 alloreactive T cells and cell counts were then performed using flow cytometry to evaluate levels of cell lysis. B2M KO T cells expressing HLA-A2 single-chain dimers containing an HLA-A2 (D227K/T228A) domain were found to show relatively high levels of protection from alloreactive T cell lysis (FIGS. 10A and 10B).

[0480] Surface-expression of the HLA class-I single-chain dimers and trimers listed in Table 9 in B2M knock-out T cells was confirmed using flow cytometry (FIG. 11). All of the HLA class-I single-chain dimers and trimers were surface-expressed within the B2M knock-out T cells.

TABLE 9
Description of exemplary HLA class-I single-chain dimers and trimers.²

| | | | | For- | | NK |
|---|---|---|---|---|---|---|
| Description | ID# | HLA-X | TMD | mat | Motif | Ligand |
| B2M/HLA-C*05(C1G) | 246 | C*05:01 | WT | SCD | | |
| B2M/HLA-C*05(C1G)- | 247 | C*05:01 | CD4 | SCD | | |
| CD4TM | | | | | | |
| B2M/HLA-C*04 | 248 | C*04:01 | WT | SCD | C2 | KIR2DL1 |
| B2M/HLA-C*04- | 249 | C*04:01 | CD4 | SCD | | (CD158a) |
| CD4TM | | | | | | |
| cPep/B2M/HLA-C*04 | 250 | C*04:01 | WT | SCT | | |
| cPep/B2M/HLA- | 251 | C*04:01 | CD4 | SCT | | |
| C*04-CD4TM | | | | | | |
| B2M/HLA-C*07(C1G) | 252 | C*07:01 | WT | SCD | C1 | KIR2DL2 |
| B2M/HLA-C*07(C1G)- | 253 | C*07:01 | CD4 | SCD | | (CD158b1) |
| CD4TM | | | | | | & |
| cPep/B2M/HLA- | 254 | C*07:01 | WT | SCT | | KIR2DL3 |
| C*07(C1G) | | | | | | (CD158b2) |
| cPep/B2M/HLA- | 255 | C*07:01 | CD4 | SCT | | |
| C*07(C1G)-CD4TM | | | | | | |
| B2M/HLA-B*57 | 256 | B*57:01 | WT | SCD | Bw4 | KIR3DL1 |
| B2M/HLA-B*57- | 257 | B*57:01 | CD4 | SCD | | (CD158e1) |
| CD4TM | | | | | | |
| cPep/B2M/HLA-B*57 | 258 | B*57:01 | WT | SCT | | |
| cPep/B2M/HLA- | 259 | B*57:01 | CD4 | SCT | | |
| B*57-CD4TM | | | | | | |

²Table 9 lists the natural killer (NK) cell inhibitor motif (see. e.g., Sim, et al. “Canonical and Cross-reactive Binding of NK Cell Inhibitory Receptors to Hla-C Allotypes is Dictated by Peptides Bound to HLA-C, Frontiers in Immunology, vol. 8, art. 193 (2017), the disclosure of which is incorporated herein by reference in its entirety for all purposes) comprised by each HLA-X domain and the corresponding NK cell ligand. In Table 9, “TMD” indicates a transmembrane domain, which is either a wild-type (WT) transmembrane domain corresponding to the indicated HLA-X domain, or a CD4 domain. The identification numbers (ID#'s) correspond to those used in FIGS. 11-13. In Table 9, “SCD” indicates “single-chain dimer” and “SCT” indicates “single-chain trimer.”

[0481] Experiments were next undertaken to determine whether expression of the HLA class-I single-chain dimers and trimers in B2M knock-out T cells was protective against lysis by natural killer cells. B2M knock-out T cells expressing the following HLA class-I single-chain dimers and trimers were co-cultured with primary human NK cells at a 1:1 effector-to-target ratio for 6 hours: B2M/HLA-A*02; B2M/HLA-C*05 (C1G); B2M/HLA-C*05 (C1G)-CD4TM; B2M/HLA-C*04; B2M/HLA-C*04-CD4TM; cPep/B2M/HLA-C*04; cPep/B2M/HLA-C*04-CD4TM; B2M/HLA-C*07 (C1G); B2M/HLA-C*07 (C1G)-CD4TM; cPep/B2M/HLA-C*07 (C1G); cPep/B2M/HLA-C*07 (C1G)-CD4TM; B2M/HLA-B*57; B2M/HLA-B*57-CD4TM; cPep/B2M/HLA-B*57; cPep/B2M/HLA-B*57-CD4TM; B2M/HLA-A*03; B2M/HLA-A*03-CD4TM; cPep/B2M/HLA-A*03; cPep/B2M/HLA-A*03-CD4TM; B2M/HLA-E-CD4TM, and cPep/B2M/HLA-E-CD4TM (see Tables 8A and 9). The frequency of degranulating (CD107a+) NK cells was measured using flow cytometry staining the cells using an anti-CD107a BV650 antibody. Also, the NK cells were stained using antibodies against the inhibitor receptors CD158a (FIG. 12A), CD158b (FIG. 12B), and CD158e1 (FIG. 12C) to measure degranulation in the CD158a+, CD158b+, and CD158e1+ natural killer cell sub-populations (i.e., NK cells of different “KIR types”), respectively. An NK cell surface-expressing a particular KIR ligand (e.g., KIR2DL1 (CD158a), KIR2DL2 (CD158b1), KIR2DL3 (CD158b2), or KIR3DL1 (CD158e1)) can be referred to as having a “KIR-type” corresponding to the ligand(s) that is surface-expressed. As indicated in Table 9 and as shown in FIGS. 12A-12C, particular HLA-X polypeptides (e.g., C*05:01, C*04:01, C*07:01, and B*57:01) inhibited activation of NK cells having particular KIR types to varying degrees depending upon the inhibitory motifs (e.g., C1, C2, or Bw4) contained in the HLA-X polypeptide. It was found that expression of the HLA class-I single-chain dimers and timers containing an HLA-B or HLA-C class-I heavy chain polypeptide domain inhibited NK cell degranulation.

[0482] To further evaluate whether expression of the HLA class-I single-chain dimers and trimers in B2M knock-out T cells was protective against lysis by natural killer cells, B2M knock-out T cells expressing the following HLA class-I single-chain dimers (on-target cells) were evenly mixed with unmodified HLA-A+, -B+, C+ cells (off-target cells), and then co-cultured with primary human NK cells at 1:1 and 0:1 (control experiment) effector-to-target ratios for 48 hours: B2M/HLA-A*02; B2M/HLA-C*05 (C1G); B2M/HLA-C*05 (C1G)-CD4TM; B2M/HLA-C*04; B2M/HLA-C*04-CD4TM; cPep/B2M/HLA-C*04; cPep/B2M/HLA-C*04-CD4TM; B2M/HLA-C*07 (C1G); B2M/HLA-C*07 (C1G)-CD4TM; cPep/B2M/HLA-C*07 (C1G); cPep/B2M/HLA-C*07 (C1G)-CD4TM; B2M/HLA-B*57; B2M/HLA-B*57-CD4TM; cPep/B2M/HLA-B*57; cPep/B2M/HLA-B*57-CD4TM; B2M/HLA-A*03; B2M/HLA-A*03-CD4TM; cPep/B2M/HLA-A*03; and cPep/B2M/HLA-A*03-CD4TM (FIG. 13 and Tables 8A and 9). Specific lysis of on-target cells was calculated by measuring the residual frequency of on-target cells in the presence of effector natural killer (NK) cells (1:1 effector-to-target cell ratio) relative to a control containing no effector natural killer cells (i.e., 0:1 effector-to-target cell ratio). FIG. 13 shows the frequency of specific lysis of on-target cells that was mediated by the natural killer cells. Surface-expression in the B2M knock-out T cells of the HLA class-I single-chain dimers conferred protection against NK cell lysis relative to on-target B2M knock-out base edited cells that did not express the HLA class-I single-chain dimers.

[0483] To further improved the ability of the HLA class-I single-chain dimers and trimers to inhibit cell lysis by natural killer or alloreactive T cells, HLA class-I single chain dimers and trimers were prepared that further contained effector domains whose function increased inhibition of alloreactive T and NK cells (FIGS. 14A and 14B). The HLA class-I single-chain dimers and trimers containing the effector domains were referred to as “functionalized” single-chain dimers and trimers. Some functionalized single-chain dimers and trimers were prepared by fusing an HLA class-I single-chain dimer or trimer at the N-terminus to the extracellular domain of a polypeptide that inhibits NK cell and/or T cell activation (e.g., a PD-L1, CTLA4, an additional HLA class-I single chain dimer or trimer, an HLA class-I heavy chain domain, or an HLA-E domain) (see Table 8B). Some functionalized single-chain dimers and trimers were prepared by fusing an HLA class-I single-chain dimer or trimer at the C-terminus to a membrane-bound domain that inhibits NK cell and/or T cell activation (e.g., a CD47 domain) (see Table 8B). In particular, the following functionalized single-chain dimers and trimers were prepared: CTLA4 (ECD)/B2M/HLA-B*57; B2M/HLA-B*57 (ΔTM)-CD47; B2M/HLA-B*57 (ΔTM)/CD47; B2M/HLA-C*05 (ΔTM)/B2M/HLA-B*58; and cPep/B2M/HLA-E (ΔTM)/B2M/HLA-B*57, where ΔTM indicates a deletion of the transmembrane domain of the indicated HLA class-I heavy chain domain.

### Other Embodiments

[0484] From the foregoing description, it will be apparent that variations and modifications may be made to the aspects or embodiments described herein to adopt it to various usages and conditions. Such embodiments are also within the scope of the following claims.

[0485] The recitation of a listing of elements in any definition of a variable herein includes definitions of that variable as any single element or combination (or subcombination) of listed elements. The recitation of an embodiment herein includes that embodiment as any single embodiment or in combination with any other embodiments or portions thereof.

[0486] All patents and publications mentioned in this specification are herein incorporated by reference to the same extent as if each independent patent and publication was specifically and individually indicated to be incorporated by reference. The disclosure may be related to International Patent Applications No. PCT/US22/75021, PCT/US20/13964, PCT/US20/52822, PCT/US20/18178, PCT/US21/52035, PCT/US22/81241, PCT/US23/67780, PCT/US23/68543, the disclosures of which is incorporated herein by reference in their entirety for all purposes.

What is claimed:

1. A fusion polypeptide comprising an HLA heavy chain polypeptide, or a functional fragment thereof, and a beta-2-microglobulin (B2M) polypeptide, or a functional fragment thereof.

2. The fusion polypeptide of claim 1, wherein the HLA heavy chain polypeptide and/or the B2M polypeptide comprise an amino acid alteration that reduces affinity of binding to a CD8 polypeptide relative to a wild-type HLA heavy chain polypeptide and/or B2M polypeptide.

3. The fusion polypeptide of claim 1, wherein the HLA heavy chain polypeptide is an HLA-A, HLA-B, or HLA-C polypeptide.

4. The fusion polypeptide of claim 3, wherein the HLA heavy chain polypeptide comprises one or more amino acid alterations to one or more of amino acid positions 183-274.

5. The fusion polypeptide of claim 4, wherein the HLA heavy chain polypeptide comprises one or more amino acid alterations at an amino acid position selected from the group consisting of A73, D227, T228, and A245.

6. The fusion polypeptide of any one of claims 1-5, wherein the HLA heavy chain polypeptide comprises one or more amino acid alterations selected from the group consisting of A73T, D227K, T228A, and A245V.

7. The fusion polypeptide of claim 6, wherein the HLA heavy chain polypeptide comprises the alterations D227K and T228A, or the alterations D227K, T228A, and A245V.

8. The fusion polypeptide of any one of claims 1-7, wherein the B2M polypeptide comprises an amino acid alteration.

9. The fusion polypeptide of claim 8, wherein the B2M polypeptide comprises an amino acid alteration at position K58.

10. The fusion polypeptide of claim 9, wherein the B2M polypeptide comprises the amino acid alteration K58E.

11. The fusion polypeptide of claim 1 further comprising a cognate peptide (cPep).

12. The fusion polypeptide of claim 11, wherein the cPep comprises from about 8 to about 10 amino acids.

13. The fusion polypeptide of claim 12, wherein the cPep comprises 9 amino acids.

14. The fusion polypeptide of claim 12 or 13, wherein the cPep comprises an amino acid sequence selected from the group consisting of QYDDAVYKL (SEQ ID NO: 520), RYRPGTVAL (SEQ ID NO: 521), LSSPVTKSF (SEQ ID NO: 522), EEVHDLERKY (SEQ ID NO: 523), RLRAEAQVK (SEQ ID NO: 524), IIDKSGAAV (SEQ ID NO: 529; IV9 (AA)), IIDKSGEEV (SEQ ID NO: 530; IV9 (EE)), IIDKSGLAV (SEQ ID NO: 531; IV9 (LA)), IIDKSGSTV (SEQ ID NO: 532; IV9 (WT)), and the cPep sequences listed in Table A.

15. The fusion polypeptide of any one of claims 1-14, wherein the fusion polypeptide comprises one or more linkers.

16. The fusion polypeptide of claim 15, wherein the one or more linkers comprise the amino acid sequence (GGGGS)ₙ (SEQ ID NO: 247).

17. The fusion polypeptide of claim 16, wherein n is 3 or 4.

18. The fusion polypeptide any one of claims 1-17 further comprising a signal peptide.

19. The fusion polypeptide of claim 18, wherein the signal peptide is a B2M signal peptide.

20. The fusion polypeptide of claim 19, wherein the signal peptide comprises the amino acid sequence MSRSVALAVLALLSLSGLEA (SEQ ID NO: 525).

21. The fusion polypeptide of any one of claims 1-20, further comprising a transmembrane domain.

22. The fusion polypeptide of claim 21, wherein the transmembrane domain is a cluster of differentiation 4 (CD4) transmembrane (CD4TM) domain.

23. The fusion polypeptide of claim 22, wherein the CD4TM domain comprises an amino acid sequence with at least about 85% sequence identity to the amino acid sequence MALIVLGGVAGLLLFIGLGIFFCVRC (SEQ ID NO: 437).

24. The fusion polypeptide of any one of claims 1-23, wherein the HLA heavy chain polypeptide comprises a sequence with at least 85% sequence identity to an amino acid sequence selected from the group consisting of:
HLA-A*02 (HLA-A2)
(SEQ ID NO: 441)
GSHSMRYFFTSVSRPGRGEPRFIAVGYVDDTQFVRFDSDAASQRMEPRAPWIEQEGPEYWDGET
RKVKAHSQTHRVDLGTLRGYYNQSEAGSHTVQRMYGCDVGSDWRFLRGYHQYAYDGKDYIALKE
DLRSWTAADMAAQTTKHKWEAAHVAEQLRAYLEGTCVEWLRRYLENGKETLQRTDAPKTHMTHH
AVSDHEATLRCWALSFYPAEITLTWQRDGEDQTQDTELVETRPAGDGTFQKWAAVVVPSGQEQR
YTCHVQHEGLPKPLTLRWEPSSQPTIPIVGIIAGLVLFGAVITGAVVAAVMWRRKSSDRKGGSY
SQAASSDSAQGSDVSLTACKV;
HLA-A*03
(SEQ ID NO: 442)
GSHSMRYFFTSVSRPGRGEPRFIAVGYVDDTQFVRFDSDAASQRMEPRAPWIEQEGPEYWDQET
RNVKAQSQTDRVDLGTLRGYYNQSEAGSHTIQIMYGCDVGSDGRFLRGYRQDAYDGKDYIALNE
DLRSWTAADMAAQITKRKWEAAHEAEQLRAYLDGTCVEWLRRYLENGKETLQRTDPPKTHMTHH
PISDHEATLRCWALGFYPAEITLTWQRDGEDQTQDTELVETRPAGDGTFQKWAAVVVPSGEEQR
YTCHVQHEGLPKPLTLRWELSSQPTIPIVGIIAGLVLLGAVITGAVVAAVMWRRKSSDRKGGSY
TQAASSDSAQGSDVSLTACKV;
HLA-B*57
(SEQ ID NO: 445)
GSHSMRYFYTAMSRPGRGEPRFIAVGYVDDTQFVRFDSDAASPRMAPRAPWIEQEGPEYWDGET
RNMKASAQTYRENLRIALRYYNQSEAGSHIIQVMYGCDVGPDGRLLRGHDQSAYDGKDYIALNE
DLSSWTAADTAAQITQRKWEAARVAEQLRAYLEGLCVEWLRRYLENGKETLQRADPPKTHVTHH
PISDHEATLRCWALGFYPAEITLTWQRDGEDQTQDTELVETRPAGDRTFQKWAAVVVPSGEEQR
YTCHVQHEGLPKPLTLRWEPSSQSTVPIVGIVAGLAVLAVVVIGAVVAAVMCRRKSSGGKGGSY
SQAACSDSAQGSDVSLTA;
HLA-B*44
(SEQ ID NO: 446)
GSHSMRYFYTAMSRPGRGEPRFITVGYVDDTLFVRFDSDATSPRKEPRAPWIEQEGPEYWDRET
QISKTNTQTYRENLRTALRYYNQSEAGSHIIQRMYGCDVGPDGRLLRGYDQDAYDGKDYIALNE
DLSSWTAADTAAQITQRKWEAARVAEQDRAYLEGLCVESLRRYLENGKETLQRADPPKTHVTHH
PISDHEVTLRCWALGFYPAEITLTWQRDGEDQTQDTELVETRPAGDRTFQKWAAVVVPSGEEQR
YTCHVQHEGLPKPLTLRWEPSSQSTVPIVGIVAGLAVLAVVVIGAVVAAVMCRRKSSGGKGGSY
SQAACSDSAQGSDVSLTA;
HLA-C*04
(SEQ ID NO: 449)
GSHSMRYFSTSVSWPGRGEPRFIAVGYVDDTQFVRFDSDAASPRGEPREPWVEQEGPEYWDRET
QKYKRQAQADRVNLRKLRGYYNQSEDGSHTLQRMFGCDLGPDGRLLRGYNQFAYDGKDYIALNE
DLRSWTAADTAAQITQRKWEAAREAEQRRAYLEGTCVEWLRRYLENGKETLQRAEHPKTHVTHH
PVSDHEATLRCWALGFYPAEITLTWQWDGEDQTQDTELVETRPAGDGTFQKWAAVVVPSGEEQR
YTCHVQHEGLPEPLTLRWKPSSQPTIPIVGIVAGLAVLAVLAVLGAMVAVVMCRRKSSGGKGGS
CSQAASSNSAQGSDESLIACKA;
HLA-C*05
(SEQ ID NO: 450)
CSHSMRYFYTAVSRPGRGEPRFIAVGYVDDTQFVQFDSDAASPRGEPRAPWVEQEGPEYWDRET
QKYKRQAQTDRVNLRKLRGYYNQSEAGSHTLQRMYGCDLGPDGRLLRGYNQFAYDGKDYIALNE
DLRSWTAADKAAQITQRKWEAAREAEQRRAYLEGTCVEWLRRYLENGKKTLQRAEHPKTHVTHH
PVSDHEATLRCWALGFYPAEITLTWQRDGEDQTQDTELVETRPAGDGTFQKWAAVVVPSGEEQR
YTCHVQHEGLPEPLTLRWGPSSQPTIPIVGIVAGLAVLAVLAVLGAVMAVVMCRRKSSGGKGGS
CSQAASSNSAQGSDESLIACKA;
and
HLA-C*07
(SEQ ID NO: 451)
CSHSMRYFDTAVSRPGRGEPRFISVGYVDDTQFVRFDSDAASPRGEPRAPWVEQEGPEYWDRET
QKYKRQAQADRVSLRNLRGYYNQSEDGSHTLQRMSGCDLGPDGRLLRGYDQSAYDGKDYIALNE
DLRSWTAADTAAQITQRKLEAARAAEQLRAYLEGTCVEWLRRYLENGKETLQRAEPPKTHVTHH
PLSDHEATLRCWALGFYPAEITLTWQRDGEDQTQDTELVETRPAGDGTFQKWAAVVVPSGQEQR
YTCHMQHEGLQEPLTLSWEPSSQPTIPIMGIVAGLAVLVVLAVLGAVVTAMMCRRKSSGGKGGS
CSQAACSNSAQGSDESLITCKA.

25. The fusion polypeptide of any one of claims 1-24, wherein the B2M polypeptide comprises a sequence with at least 85% sequence identity to the amino acid sequence
(SEQ ID NO: 426)
IQRTPKIQVYSRHPAENGKSNFLNCYVSGFHPSDIEVDLLKNGERIEKV
EHSDLSFSKDWSFYLLYYTEFTPTEKDEYACRVNHVTLSQPKIVKWDRD
M.

26. The fusion polypeptide of claim 1, wherein the fusion polypeptide comprises from N-terminus to C-terminus:
A) the B2M polypeptide and the HLA heavy chain polypeptide;
B) the B2M polypeptide, a linker, and the HLA heavy chain polypeptide;
C) a cognate peptide (cPep), the B2M polypeptide, and the HLA heavy chain polypeptide;
D) a cognate peptide (cPep), the B2M polypeptide, a linker, and the HLA heavy chain polypeptide;
E) a cognate peptide (cPep), a linker, the B2M polypeptide, a linker, and the HLA heavy chain polypeptide;
F) a signal peptide, the B2M polypeptide, a linker, and the HLA heavy chain polypeptide;
G) a signal peptide, the B2M polypeptide and the HLA heavy chain polypeptide;
H) a signal peptide, the B2M polypeptide, a linker, and the HLA heavy chain polypeptide;
I) a signal peptide, a cognate peptide (cPep), the B2M polypeptide, and the HLA heavy chain polypeptide;
J) a signal peptide, a cognate peptide (cPep), the B2M polypeptide, a linker, and the HLA heavy chain polypeptide; or
K) a signal peptide, a cognate peptide (cPep), a linker, the B2M polypeptide, a linker, and the HLA heavy chain polypeptide.

27. The fusion polypeptide of claim 26 further comprising a transmembrane domain C-terminal to the HLA heavy chain polypeptide.

28. A fusion polypeptide comprising an amino acid sequence with at least 85% sequence identity to a polypeptide sequence listed in Table 8A.

29. A polynucleotide encoding the fusion polypeptide of any one of claims 1-26.

30. The polynucleotide of claim 29, wherein the polynucleotide comprises a sequence with at least 85% sequence identity to a polynucleotide sequence listed in Table 8B.

31. A vector comprising a polynucleotide encoding the fusion polypeptide of any one of claims 1-26.

32. The vector of claim 31, wherein the vector is a viral vector or a transposon.

33. The vector of claim 32, wherein the vector is a lentiviral vector.

34. A cell comprising the fusion polypeptide of any one of claims 1-28, the polynucleotide of claim 29 or claim 30, or the vector of any one of claims 31-33.

35. The cell of claim 34, wherein the cell is an immune cell, a hepatocyte, a stem cell, an induced pluripotent stem cell, an islet cell, or a progenitor thereof.

36. A pharmaceutical composition comprising the polynucleotide of claim 29 or claim 30, the vector of any one of claims 31-33, or the cell of claim 34 or claim 35, and a pharmaceutically acceptable excipient.

37. A method for preparing a modified cell, the method comprising:
a) modifying a cell to knock-out expression of an endogenous beta-2-microglobulin (B2M) polypeptide in the cell; and
b) contacting the cell with a polynucleotide encoding a fusion polypeptide comprising an HLA heavy chain polypeptide, or a functional fragment thereof, and a beta-2-microglobulin (B2M) polypeptide, or a functional fragment thereof, and expressing the polypeptide in the cell.

38. The method of claim 37, wherein the HLA heavy chain polypeptide and/or the B2M polypeptide comprise an amino acid alteration that that reduces affinity of binding to a CD8 polypeptide relative to a wild-type HLA heavy chain polypeptide and/or B2M polypeptide.

39. The method of claim 37, wherein the HLA heavy chain polypeptide is an HLA-A, HLA-B, HLA-C, or HLA-E polypeptide.

40. The method of claim 37, wherein the HLA heavy chain polypeptide comprises one or more amino acid alterations to one or more of amino acid positions 183-274.

41. The method of claim 37, wherein the HLA heavy chain polypeptide comprises one or more amino acid alterations at an amino acid position selected from the group consisting of A73, D227, T228, and A245.

42. The method of any one of claims 37-41, wherein the HLA heavy chain polypeptide comprises one or more amino acid alterations selected from the group consisting of A73T, D227K, T228A, and A245V.

43. The method of claim 42, wherein the HLA heavy chain polypeptide comprises the alterations D227K and T228A, or the alterations D227K, T228A, and A245V.

44. The method of any one of claims 37-43, wherein the B2M polypeptide comprises an amino acid alteration.

45. The method of claim 44, wherein the B2M polypeptide comprises an amino acid alteration at position K58.

46. The method of claim 45, wherein the B2M polypeptide comprises the amino acid alteration K58E.

47. The method of claim 37 wherein the fusion polypeptide further comprises a cognate peptide (cPep).

48. The method of claim 47, wherein the cPep comprises from about 8 to about 10 amino acids.

49. The method of claim 48, wherein the cPep comprises 9 amino acids.

50. The method of claim 48 or claim 49, wherein the cPep comprises an amino acid sequence selected from the group consisting of QYDDAVYKL (SEQ ID NO: 520), RYRPGTVAL (SEQ ID NO: 521), LSSPVTKSF (SEQ ID NO: 522), EEVHDLERKY (SEQ ID NO: 523), RLRAEAQVK (SEQ ID NO: 524), IIDKSGAAV (SEQ ID NO: 529; IV9 (AA)), IIDKSGEEV (SEQ ID NO: 530; IV9 (EE)), IIDKSGLAV (SEQ ID NO: 531; IV9 (LA)), IIDKSGSTV (SEQ ID NO: 532; IV9 (WT)), and the cPep sequences listed in Table A.

51. The method of any one of claims 37-50, wherein fusion polypeptide comprises one or more linkers.

52. The method of claim 51, wherein the one or more linkers comprise the amino acid sequence (GGGGS)ₙ (SEQ ID NO: 247).

53. The method of claim 52, wherein n is 3 or 4.

54. The method any one of claims 37-53, wherein the fusion polypeptide further comprises a signal peptide.

55. The method of claim 54, wherein the signal peptide is a B2M signal peptide.

56. The method of claim 55, wherein the signal peptide comprises the amino acid sequence MSRSVALAVLALLSLSGLEA (SEQ ID NO: 525).

57. The method of any one of claims 37-56, wherein the fusion polypeptide further comprises a transmembrane domain.

58. The method of claim 57, wherein the transmembrane domain is a cluster of differentiation 4 (CD4) transmembrane (CD4TM) domain.

59. The method of claim 58, wherein the CD4TM domain comprises an amino acid sequence with at least about 85% sequence identity to the amino acid sequence
(SEQ ID NO: 437)
MALIVLGGVAGLLLFIGLGIFFCVRC.

60. The method of any one of claims 37-59, wherein the HLA heavy chain polypeptide comprises a sequence with at least 85% sequence identity to an amino acid sequence selected from the group consisting of:
HLA-A*02 (HLA-A2)
(SEQ ID NO: 441)
GSHSMRYFFTSVSRPGRGEPRFIAVGYVDDTQFVRFDSDAASQRMEPRAPWIEQEGPEYWDGET
RKVKAHSQTHRVDLGTLRGYYNQSEAGSHTVQRMYGCDVGSDWRFLRGYHQYAYDGKDYIALKE
DLRSWTAADMAAQTTKHKWEAAHVAEQLRAYLEGTCVEWLRRYLENGKETLQRTDAPKTHMTHH
AVSDHEATLRCWALSFYPAEITLTWQRDGEDQTQDTELVETRPAGDGTFQKWAAVVVPSGQEQR
YTCHVQHEGLPKPLTLRWEPSSQPTIPIVGIIAGLVLFGAVITGAVVAAVMWRRKSSDRKGGSY
SQAASSDSAQGSDVSLTACKV;
HLA-A*03
(SEQ ID NO: 442)
GSHSMRYFFTSVSRPGRGEPRFIAVGYVDDTQFVRFDSDAASQRMEPRAPWIEQEGPEYWDQET
RNVKAQSQTDRVDLGTLRGYYNQSEAGSHTIQIMYGCDVGSDGRFLRGYRQDAYDGKDYIALNE
DLRSWTAADMAAQITKRKWEAAHEAEQLRAYLDGTCVEWLRRYLENGKETLQRTDPPKTHMTHH
PISDHEATLRCWALGFYPAEITLTWQRDGEDQTQDTELVETRPAGDGTFQKWAAVVVPSGEEQR
YTCHVQHEGLPKPLTLRWELSSQPTIPIVGIIAGLVLLGAVITGAVVAAVMWRRKSSDRKGGSY
TQAASSDSAQGSDVSLTACKV;
HLA-B*57
(SEQ ID NO: 445)
GSHSMRYFYTAMSRPGRGEPRFIAVGYVDDTQFVRFDSDAASPRMAPRAPWIEQEGPEYWDGET
RNMKASAQTYRENLRIALRYYNQSEAGSHIIQVMYGCDVGPDGRLLRGHDQSAYDGKDYIALNE
DLSSWTAADTAAQITQRKWEAARVAEQLRAYLEGLCVEWLRRYLENGKETLQRADPPKTHVTHH
PISDHEATLRCWALGFYPAEITLTWQRDGEDQTQDTELVETRPAGDRTFQKWAAVVVPSGEEQR
YTCHVQHEGLPKPLTLRWEPSSQSTVPIVGIVAGLAVLAVVVIGAVVAAVMCRRKSSGGKGGSY
SQAACSDSAQGSDVSLTA;
HLA-B*44
(SEQ ID NO: 446)
GSHSMRYFYTAMSRPGRGEPRFITVGYVDDTLFVRFDSDATSPRKEPRAPWIEQEGPEYWDRET
QISKTNTQTYRENLRTALRYYNQSEAGSHIIQRMYGCDVGPDGRLLRGYDQDAYDGKDYIALNE
DLSSWTAADTAAQITQRKWEAARVAEQDRAYLEGLCVESLRRYLENGKETLQRADPPKTHVTHH
PISDHEVTLRCWALGFYPAEITLTWQRDGEDQTQDTELVETRPAGDRTFQKWAAVVVPSGEEQR
YTCHVQHEGLPKPLTLRWEPSSQSTVPIVGIVAGLAVLAVVVIGAVVAAVMCRRKSSGGKGGSY
SQAACSDSAQGSDVSLTA;
HLA-C*04
(SEQ ID NO: 449)
GSHSMRYFSTSVSWPGRGEPRFIAVGYVDDTQFVRFDSDAASPRGEPREPWVEQEGPEYWDRET
QKYKRQAQADRVNLRKLRGYYNQSEDGSHTLQRMFGCDLGPDGRLLRGYNQFAYDGKDYIALNE
DLRSWTAADTAAQITQRKWEAAREAEQRRAYLEGTCVEWLRRYLENGKETLQRAEHPKTHVTHH
PVSDHEATLRCWALGFYPAEITLTWQWDGEDQTQDTELVETRPAGDGTFQKWAAVVVPSGEEQR
YTCHVQHEGLPEPLTLRWKPSSQPTIPIVGIVAGLAVLAVLAVLGAMVAVVMCRRKSSGGKGGS
CSQAASSNSAQGSDESLIACKA;
HLA-C*05
(SEQ ID NO: 450)
CSHSMRYFYTAVSRPGRGEPRFIAVGYVDDTQFVQFDSDAASPRGEPRAPWVEQEGPEYWDRET
QKYKRQAQTDRVNLRKLRGYYNQSEAGSHTLQRMYGCDLGPDGRLLRGYNQFAYDGKDYIALNE
DLRSWTAADKAAQITQRKWEAAREAEQRRAYLEGTCVEWLRRYLENGKKTLQRAEHPKTHVTHH
PVSDHEATLRCWALGFYPAEITLTWQRDGEDQTQDTELVETRPAGDGTFQKWAAVVVPSGEEQR
YTCHVQHEGLPEPLTLRWGPSSQPTIPIVGIVAGLAVLAVLAVLGAVMAVVMCRRKSSGGKGGS
CSQAASSNSAQGSDESLIACKA;
and
HLA-C*07
(SEQ ID NO: 451)
CSHSMRYFDTAVSRPGRGEPRFISVGYVDDTQFVRFDSDAASPRGEPRAPWVEQEGPEYWDRET
QKYKRQAQADRVSLRNLRGYYNQSEDGSHTLQRMSGCDLGPDGRLLRGYDQSAYDGKDYIALNE
DLRSWTAADTAAQITQRKLEAARAAEQLRAYLEGTCVEWLRRYLENGKETLQRAEPPKTHVTHH
PLSDHEATLRCWALGFYPAEITLTWQRDGEDQTQDTELVETRPAGDGTFQKWAAVVVPSGQEQR
YTCHMQHEGLQEPLTLSWEPSSQPTIPIMGIVAGLAVLVVLAVLGAVVTAMMCRRKSSGGKGGS
CSQAACSNSAQGSDESLITCKA.

61. The method of any one of claims 37-60, wherein the B2M polypeptide comprises a sequence with at least 85% sequence identity to the amino acid sequence
(SEQ ID NO: 426)
IQRTPKIQVYSRHPAENGKSNFLNCYVSGFHPSDIEVDLLKNGERIEKV
EHSDLSFSKDWSFYLLYYTEFTPTEKDEYACRVNHVTLSQPKIVKWDRD
M.

62. The method of claim 37, wherein the fusion polypeptide comprises from N-terminus to C-terminus:
A) the B2M polypeptide and the HLA heavy chain polypeptide;
B) the B2M polypeptide, a linker, and the HLA heavy chain polypeptide;
C) a cognate peptide (cPep), the B2M polypeptide, and the HLA heavy chain polypeptide;
D) a cognate peptide (cPep), the B2M polypeptide, a linker, and the HLA heavy chain polypeptide;
E) a cognate peptide (cPep), a linker, the B2M polypeptide, a linker, and the HLA heavy chain polypeptide;
F) a signal peptide, the B2M polypeptide, a linker, and the HLA heavy chain polypeptide;
G) a signal peptide, the B2M polypeptide and the HLA heavy chain polypeptide;
H) a signal peptide, the B2M polypeptide, a linker, and the HLA heavy chain polypeptide;
I) a signal peptide, a cognate peptide (cPep), the B2M polypeptide, and the HLA heavy chain polypeptide;
J) a signal peptide, a cognate peptide (cPep), the B2M polypeptide, a linker, and the HLA heavy chain polypeptide; or
K) a signal peptide, a cognate peptide (cPep), a linker, the B2M polypeptide, a linker, and the HLA heavy chain polypeptide.

63. The method of claim 52 further comprising a transmembrane domain C-terminal to the HLA heavy chain polypeptide.

64. The method of any one of claims 37-63, further comprising contacting the cell with a vector comprising the polynucleotide.

65. The method of claim 64, wherein the vector is a viral vector or a transposon.

66. The method of claim 65, wherein the vector is a lentiviral vector.

67. The method of any one of claims 37-66, wherein modifying the cell to knock-out expression of B2M is carried out using base editing.

68. The method of claim 67, wherein the base editing comprises contacting the cell with a base editor and a guide polynucleotide targeting the base editor to effect an alteration of a nucleobase of an endogenous B2M gene in the cell, thereby knocking out expression of the endogenous B2M polypeptide in the cell.

69. The method of claim 68, wherein the base editor is a cytidine deaminase base editor, an adenosine deaminase base editor, or a cytidine adenosine deaminase base editor.

70. The method of claim 69, wherein the adenosine deaminase is TadA or a TadA variant.

71. The method of claim 70, wherein the TadA variant is a TadA*8 or TadA*9.

72. The method of claim 69, wherein the cytidine deaminase is APOBEC or an APOBEC variant.

73. The method of claim 69, wherein the deaminase is TadA*8.20.

74. The method of any one of claims 68-73, wherein the guide polynucleotide comprises a spacer comprising the nucleotide sequence CUUACCCCACUUAACUAUCU (SEQ ID NO: 537).

75. The method of any one of claims 68-74, wherein the guide polynucleotide comprises a scaffold comprising the nucleotide sequence
(SEQ ID NO: 626)
GUUUUAGAGCUAGAAAUAGCAAGUUAAAAUAAGGCUAGUCCGUUAUCA
ACUUGAAAAAGUGGCACCGAGUCGGUGCUUUU.

76. The method of any one of claims 37-75, further comprising expressing a chimeric antigen receptor in the cell.

77. The method of claim 76, wherein the chimeric antigen receptor targets an antigen expressed on the surface of a neoplastic cell.

78. The method of any one of claims 37-60, wherein a natural killer cell contacted with the modified cell shows reduced levels of granulation relative to levels measured when the natural killer cell is contacted with a reference cell.

79. The method of any one of claims 37-78, wherein the cell is a T cell, a natural killer cell, a hepatocyte, a stem cell, an induced pluripotent stem cell, an islet cell, or a progenitor thereof.

80. The method of claim 79, wherein the cell is a CD4+ or CD8+ cell.

81. The method of any one of claims 37-80, wherein the immune cell is an allogeneic cell.

82. The method of any one of claims 37-81, wherein the modified cell shows increased resistance to lysis by an immune effector cell relative to a reference cell.

83. The method of claim 82, wherein lysis is reduced by at least about 60%.

84. The method of claim 82, wherein lysis is reduced by at least about 90%.

85. The method of any one of claims 37-84, wherein an alloreactive T cell contacted with the modified cell shows reduced levels of cytokine production relative to levels produced when the alloreactive T cell is contacted with a reference cell.

86. The method of claim 85, wherein granzyme B (GZMB) secreted by the alloreactive T cell is reduced by at least about 10%.

87. The method of claim 85 or claim 86, wherein granzyme B (GZMB) secreted by the alloreactive T cell is reduced by at least about 50%.

88. The method of any one of any one of claims 85-87, wherein INF-gamma secreted by the alloreactive T cell is reduced by at least about 10%.

89. The method of any one of claims 85-88, wherein INF-gamma secreted by the alloreactive T cell is reduced by at least about 40%.

90. The method any one of claims 85-88, wherein TNF-alpha secreted by the alloreactive T cell is reduced by at least about 10%.

91. The method any one of claims 85-88, wherein TNF-alpha secreted by the alloreactive T cell is reduced by at least about 40%.

92. The method of any one of claims 37-91, wherein the modified cell further comprises virtually undetectable levels of HLA-A and HLA-B.

93. A method for preparing a modified cell, the method comprising:
a) modifying a cell to knock-out expression of an endogenous beta-2-microglobulin (B2M) polypeptide in the cell; and
b) contacting the cell with a polynucleotide encoding a B2M polypeptide, and expressing the B2M polypeptide in the cell, wherein
i) expression of the B2M polypeptide is reduced relative to an unmodified cell; and/or
ii) the B2M polypeptide comprises an alteration at one or more amino acids positions that effects a reduction in binding of the B2M polypeptide to an HLA heavy chain polypeptide

94. The method of claim 93, wherein the B2M polypeptide is expressed in the cell under the control of a promoter.

95. The method of claim 94, wherein the promoter is an EF1a promoter.

96. The method of any one of claims 93-95, wherein the B2M polypeptide comprises an alteration at amino acid position K58, W60, and/or position W95.

97. The method of claim 96, wherein the B2M polypeptide comprises a W60G and/or a W95G amino acid alteration.

98. The method of any one of claims 93-97, wherein modifying the cell to knock-out expression of B2M is carried out using base editing.

99. The method of claim 98, wherein the base editing comprises contacting the cell with a base editor and a guide polynucleotide targeting the base editor to effect an alteration of a nucleobase of an endogenous B2M gene in the cell, thereby knocking out expression of the endogenous B2M polypeptide in the cell.

100. The method of claim 99, wherein the base editor is a cytidine deaminase base editor, an adenosine deaminase base editor, or a cytidine adenosine deaminase base editor.

101. The method of claim 100, wherein the adenosine deaminase is TadA or a TadA variant.

102. The method of claim 101, wherein the TadA variant is a TadA*8 or TadA*9.

103. The method of claim 100, wherein the cytidine deaminase is APOBEC or an APOBEC variant.

104. The method of claim 100, wherein the deaminase is TadA*8.20.

105. The method of any one of claims 99-104, wherein the guide polynucleotide comprises a spacer comprising the nucleotide sequence CUUACCCCACUUAACUAUCU (SEQ ID NO: 537).

106. The method of any one of claims 99-105, wherein the guide polynucleotide comprises a scaffold comprising the nucleotide sequence
(SEQ ID NO: 626)
GUUUUAGAGCUAGAAAUAGCAAGUUAAAAUAAGGCUAGUCCGUUAUCAA
CUUGAAAAAGUGGCACCGAGUCGGUGCUUUU.

107. The method of any one of claims 93-106, further comprising expressing a chimeric antigen receptor in the cell.

108. The method of claim 107, wherein the chimeric antigen receptor targets an antigen expressed on the surface of a neoplastic cell.

109. The method of any one of claims 93-108, wherein a natural killer cell contacted with the modified cell shows reduced levels of granulation relative to levels measured when the natural killer cell is contacted with a reference cell.

110. The method of any one of claims 93-109, wherein the cell is a T cell, a natural killer cell, a hepatocyte, a stem cell, an induced pluripotent stem cell, an islet cell, or a progenitor thereof.

111. The method of claim 110, wherein the cell is a CD4+ or CD8+ cell.

112. The method of any one of claims 93-111, wherein the cell is an allogeneic cell.

113. The method of any one of claims 93-112, wherein the modified immune cell shows increased resistance to lysis by an immune effector cell relative to a reference cell.

114. The method of claim 113, wherein lysis is reduced by at least about 60%.

115. The method of claim 113 or claim 114, wherein lysis is reduced by at least about 90%.

116. The method of any one of claims 93-115, wherein an alloreactive T cell contacted with the modified cell shows reduced levels of cytokine production relative to levels produced when the alloreactive T cell is contacted with a reference cell.

117. The method of claim 116, wherein granzyme B (GZMB) secreted by the alloreactive T cell is reduced by at least about 10%.

118. The method of claim 116 or claim 117, wherein granzyme B (GZMB) secreted by the alloreactive T cell is reduced by at least about 50%.

119. The method of any one of claims 116-118, wherein INF-gamma secreted by the alloreactive T cell is reduced by at least about 10%.

120. The method of any one of claims 116-119, wherein INF-gamma secreted by the alloreactive T cell is reduced by at least about 40%.

121. The method any one of claims 116-120, wherein TNF-alpha secreted by the alloreactive T cell is reduced by at least about 10%.

122. The method any one of claims 116-121, wherein TNF-alpha secreted by the alloreactive T cell is reduced by at least about 40%.

123. The method of any one of claims 93-122, wherein the method effects a reduction in levels of surface expression of an HLA-A, HLA-B, and/or HLA-C polypeptide on the cell relative to a reference cell.

124. The method of claim 123, wherein surface expression is reduced by at least about 40%.

125. The method of claim 123, wherein surface expression is reduced by at least about 80%.

126. The method of any one of claims 93-125, wherein the modified cell further comprises virtually undetectable levels of HLA-A and HLA-B.

127. The method of any one of claims 93-126, wherein expression of the B2M polypeptide is reduced by at least about 75% relative to an unmodified cell.

128. The method of any one of claims 93-127, wherein expression of the B2M polypeptide is reduced by at least about 90% relative to an unmodified cell.

129. A modified cell prepared according to the method of any one of claims 37-128.

130. The modified cell of claim 129, wherein the cell expresses a chimeric antigen receptor that binds an antigen expressed on the surface of a neoplastic cell.

131. The modified cell of claim 130, wherein a natural killer cell contacted with the modified cell shows reduced levels of granulation relative to levels measured when the natural killer cell is contacted with a reference cell.

132. A pharmaceutical composition comprising the modified cell of any one of claims 129-131 and a pharmaceutically acceptable excipient.

133. A method for killing a neoplastic cell, the method comprising contacting the neoplastic cell with the cell of any one of claim 33-35 or 129-131, or the pharmaceutical composition of claim 36 or claim 132.

134. A method for treating a subject having a neoplasia, the method comprising administering to the subject the cell of any one of claim 33-35 or 129-131, or the pharmaceutical composition of claim 36 or claim 132.

135. A kit for use in the method of any one of claim 37-128, 133, or 134, wherein the kit comprises the fusion polypeptide, polynucleotide, vector, pharmaceutical composition, and/or cell of any of the above claims.

The application's sequence listing, which the Patent Office published only in electronic form, follows.

SEQUENCE LISTING (669 sequences)

SEQ ID NO: 1 - protein, 167 aa, Escherichia coli
  REGION 1..167: note = misc_feature - TadA*7.10 (ecTadA) polypeptide sequence
MSEVEFSHEYWMRHALTLAKRARDEREVPVGAVLVLNNRVIGEGWNRAIGLHDPTAHAEIMALRQGGLVMQNYRLIDATLYVTFEPCVMCAGAMIHSRIGRVVFGVRNAKTGAAGSLMDVLHYPGMNHRVEITEGILADECAALLCYFFRMPRQVFNAQKKAQSSTD

SEQ ID NO: 2 - DNA, 4092 bp, synthetic construct
  misc_feature 1..4092: note = BhCas12b GGSGGS-ABE8-Xten20at P153 polynucleotide sequence
  misc_feature 1..6: note = Kozak sequence
  misc_feature 7..57: note = Sequence encoding N-terminal nuclear localization signal
  misc_feature 58..513: note = Sequence encoding BhCas12b
  misc_feature 514..531: note = Sequence encoding a linker
  misc_feature 532..1029: note = Sequence encoding TadA*8
  misc_feature 1030..1089: note = Sequence encoding Xten20 linker
  misc_feature 1090..3954: note = Sequence encoding BhCas12b
  misc_feature 3955..4002: note = Sequence encoding C-terminal NLS
  misc_feature 4003..4008: note = Sequence encoding GS linker
  misc_feature 4009..4089: note = Sequence encoding 3x hemagglutinin (HA) tag
  source 1..4092: mol_type = other DNA
gccaccatggccccaaagaagaagcggaaggtcggtatccacggagtcccagcagccgccaccagatccttcatcctgaagatcgagcccaacgaggaagtgaagaaaggcctctggaaaacccacgaggtgctgaaccacggaatcgcctactacatgaatatcctgaagctgatccggcaagaggccatctacgagcaccacgagcaggaccccaagaatcccaagaaggtgtccaaggccgagatccaggccgagctgtgggatttcgtgctgaagatgcagaagtgcaacagcttcacacacgaggtggacaaggacgaggtgttcaacatcctgagagagctgtacgaggaactggtgcccagcagcgtggaaaagaagggcgaagccaaccagctgagcaacaagtttctgtaccctctggtggaccccaacagccagtctggaaagggaacagccagcagcggcagaaagcccagatggtacaacctgaagattgccggcgatcccggaggctctggaggaagctccgaagtcgagttttcccatgagtactggatgagacacgcattgactctcgcaaagagggctcgagatgaacgcgaggtgcccgtgggggcagtactcgtgctcaacaatcgcgtaatcggcgaaggttggaatagggcaatcggactccacgaccccactgcacatgcggaaatcatggcccttcgacagggagggcttgtgatgcagaattatcgactttatgatgcgacgctgtacgtcacgtttgaaccttgcgtaatgtgcgcgggagctatgattcactcccgcattggacgagttgtattcggtgttcgcaacgccaagacgggtgccgcaggttcactgatggacgtgctgcatcatccaggcatgaaccaccgggtagaaatcacagaaggcatattggcggacgaatgtgcggcgctgttgtgtcgtttttttcgcatgcccaggcgggtctttaacgcccagaaaaaagcacaatcctctactgacggctcttctggatctgaaacacctggcacaagcgagagcgccacccctgagagctctggctcctgggaagaagagaagaagaagtgggaagaagataagaaaaaggacccgctggccaagatcctgggcaagctggctgagtacggactgatccctctgttcatcccctacaccgacagcaacgagcccatcgtgaaagaaatcaagtggatggaaaagtcccggaaccagagcgtgcggcggctggataaggacatgttcattcaggccctggaacggttcctgagctgggagagctggaacctgaaagtgaaagaggaatacgagaaggtcgagaaagagtacaagaccctggaagagaggatcaaagaggacatccaggctctgaaggctctggaacagtatgagaaagagcggcaagaacagctgctgcgggacaccctgaacaccaacgagtaccggctgagcaagagaggccttagaggctggcgggaaatcatccagaaatggctgaaaatggacgagaacgagccctccgagaagtacctggaagtgttcaaggactaccagcggaagcaccctagagaggccggcgattacagcgtgtacgagttcctgtccaagaaagagaaccacttcatctggcggaatcaccctgagtacccctacctgtacgccaccttctgcgagatcgacaagaaaaagaaggacgccaagcagcaggccaccttcacactggccgatcctatcaatcaccctctgtgggtccgattcgaggaaagaagcggcagcaacctgaacaagtacagaatcctgaccgagcagctgcacaccgagaagctgaagaaaaagctgacagtgcagctggaccggctgatctaccctacagaatctggcggctgggaagagaagggcaaagtggacattgtgctgctgcccagccggcagttctacaaccagatcttcctggacatcgaggaaaagggcaagcacgccttcacctacaaggatgagagcatcaagttccctctgaagggcacactcggcggagccagagtgcagttcgacagagatcacctgagaagataccctcacaaggtggaaagcggcaacgtgggcagaatctacttcaacatgaccgtgaacatcgagcctacagagtccccagtgtccaagtctctgaagatccaccgggacgacttccccaaggtggtcaacttcaagcccaaagaactgaccgagtggatcaaggacagcaagggcaagaaactgaagtccggcatcgagtccctggaaatcggcctgagagtgatgagcatcgacctgggacagagacaggccgctgccgcctctattttcgaggtggtggatcagaagcccgacatcgaaggcaagctgtttttcccaatcaagggcaccgagctgtatgccgtgcacagagccagcttcaacatcaagctgcccggcgagacactggtcaagagcagagaagtgctgcggaaggccagagaggacaatctgaaactgatgaaccagaagctcaacttcctgcggaacgtgctgcacttccagcagttcgaggacatcaccgagagagagaagcgggtcaccaagtggatcagcagacaagagaacagcgacgtgcccctggtgtaccaggatgagctgatccagatccgcgagctgatgtacaagccttacaaggactgggtcgccttcctgaagcagctccacaagagactggaagtcgagatcggcaaagaagtgaagcactggcggaagtccctgagcgacggaagaaagggcctgtacggcatctccctgaagaacatcgacgagatcgatcggacccggaagttcctgctgagatggtccctgaggcctaccgaacctggcgaagtgcgtagactggaacccggccagagattcgccatcgaccagctgaatcacctgaacgccctgaaagaagatcggctgaagaagatggccaacaccatcatcatgcacgccctgggctactgctacgacgtgcggaagaagaaatggcaggctaagaaccccgcctgccagatcatcctgttcgaggatctgagcaactacaacccctacgaggaaaggtcccgcttcgagaacagcaagctcatgaagtggtccagacgcgagatccccagacaggttgcactgcagggcgagatctatggcctgcaagtgggagaagtgggcgctcagttcagcagcagattccacgccaagacaggcagccctggcatcagatgtagcgtcgtgaccaaagagaagctgcaggacaatcggttcttcaagaatctgcagagagagggcagactgaccctggacaaaatcgccgtgctgaaagagggcgatctgtacccagacaaaggcggcgagaagttcatcagcctgagcaaggatcggaagtgcgtgaccacacacgccgacatcaacgccgctcagaacctgcagaagcggttctggacaagaacccacggcttctacaaggtgtactgcaaggcctaccaggtggacggccagaccgtgtacatccctgagagcaaggaccagaagcagaagatcatcgaagagttcggcgagggctacttcattctgaaggacggggtgtacgaatgggtcaacgccggcaagctgaaaatcaagaagggcagctccaagcagagcagcagcgagctggtggatagcgacatcctgaaagacagcttcgacctggcctccgagctgaaaggcgaaaagctgatgctgtacagggaccccagcggcaatgtgttccccagcgacaaatggatggccgctggcgtgttcttcggaaagctggaacgcatcctgatcagcaagctgaccaaccagtactccatcagcaccatcgaggacgacagcagcaagcagtctatgaaaaggccggcggccacgaaaaaggccggccaggcaaaaaagaaaaagggatcctacccatacgatgttccagattacgcttatccctacgacgtgcctgattatgcatacccatatgatgtccccgactatgcctaa

SEQ ID NO: 3 - protein, 1361 aa, synthetic construct
  REGION 1..1361: note = BhCas12b GGSGGS-ABE8-Xten20at P153 polypeptide sequence
MAPKKKRKVGIHGVPAAATRSFILKIEPNEEVKKGLWKTHEVLNHGIAYYMNILKLIRQEAIYEHHEQDPKNPKKVSKAEIQAELWDFVLKMQKCNSFTHEVDKDEVFNILRELYEELVPSSVEKKGEANQLSNKFLYPLVDPNSQSGKGTASSGRKPRWYNLKIAGDPGGSGGSSEVEFSHEYWMRHALTLAKRARDEREVPVGAVLVLNNRVIGEGWNRAIGLHDPTAHAEIMALRQGGLVMQNYRLYDATLYVTFEPCVMCAGAMIHSRIGRVVFGVRNAKTGAAGSLMDVLHHPGMNHRVEITEGILADECAALLCRFFRMPRRVFNAQKKAQSSTDGSSGSETPGTSESATPESSGSWEEEKKKWEEDKKKDPLAKILGKLAEYGLIPLFIPYTDSNEPIVKEIKWMEKSRNQSVRRLDKDMFIQALERFLSWESWNLKVKEEYEKVEKEYKTLEERIKEDIQALKALEQYEKERQEQLLRDTLNTNEYRLSKRGLRGWREIIQKWLKMDENEPSEKYLEVFKDYQRKHPREAGDYSVYEFLSKKENHFIWRNHPEYPYLYATFCEIDKKKKDAKQQATFTLADPINHPLWVRFEERSGSNLNKYRILTEQLHTEKLKKKLTVQLDRLIYPTESGGWEEKGKVDIVLLPSRQFYNQIFLDIEEKGKHAFTYKDESIKFPLKGTLGGARVQFDRDHLRRYPHKVESGNVGRIYFNMTVNIEPTESPVSKSLKIHRDDFPKVVNFKPKELTEWIKDSKGKKLKSGIESLEIGLRVMSIDLGQRQAAAASIFEVVDQKPDIEGKLFFPIKGTELYAVHRASFNIKLPGETLVKSREVLRKAREDNLKLMNQKLNFLRNVLHFQQFEDITEREKRVTKWISRQENSDVPLVYQDELIQIRELMYKPYKDWVAFLKQLHKRLEVEIGKEVKHWRKSLSDGRKGLYGISLKNIDEIDRTRKFLLRWSLRPTEPGEVRRLEPGQRFAIDQLNHLNALKEDRLKKMANTIIMHALGYCYDVRKKKWQAKNPACQIILFEDLSNYNPYEERSRFENSKLMKWSRREIPRQVALQGEIYGLQVGEVGAQFSSRFHAKTGSPGIRCSVVTKEKLQDNRFFKNLQREGRLTLDKIAVLKEGDLYPDKGGEKFISLSKDRKCVTTHADINAAQNLQKRFWTRTHGFYKVYCKAYQVDGQTVYIPESKDQKQKIIEEFGEGYFILKDGVYEWVNAGKLKIKKGSSKQSSSELVDSDILKDSFDLASELKGEKLMLYRDPSGNVFPSDKWMAAGVFFGKLERILISKLTNQYSISTIEDDSSKQSMKRPAATKKAGQAKKKKGSYPYDVPDYAYPYDVPDYAYPYDVPDYA

SEQ ID NO: 4 - DNA, 4092 bp, synthetic construct
  misc_feature 1..4092: note = BhCas12b GGSGGS-ABE8-Xten20at K255 polynucleotide sequence
  misc_feature 1..6: note = Kozak sequence
  misc_feature 7..57: note = Sequence encoding N-terminal nuclear localization signal (NLS)
  misc_feature 58..822: note = Sequence encoding BhCas12b
  misc_feature 823..840: note = Sequence encoding a linker
  misc_feature 841..1338: note = Sequence encoding TadA*8
  misc_feature 1339..1398: note = Sequence encoding Xten20 linker
  misc_feature 1399..3954: note = Sequence encoding BhCas12b
  misc_feature 3955..4002: note = Sequence encoding C-terminal NLS
  misc_feature 4003..4008: note = Sequence encoding a GS linker
  misc_feature 4009..4089: note = Sequence encoding 3x hemagglutinin (HA) tag
  source 1..4092: mol_type = other DNA
gccaccatggccccaaagaagaagcggaaggtcggtatccacggagtcccagcagccgccaccagatccttcatcctgaagatcgagcccaacgaggaagtgaagaaaggcctctggaaaacccacgaggtgctgaaccacggaatcgcctactacatgaatatcctgaagctgatccggcaagaggccatctacgagcaccacgagcaggaccccaagaatcccaagaaggtgtccaaggccgagatccaggccgagctgtgggatttcgtgctgaagatgcagaagtgcaacagcttcacacacgaggtggacaaggacgaggtgttcaacatcctgagagagctgtacgaggaactggtgcccagcagcgtggaaaagaagggcgaagccaaccagctgagcaacaagtttctgtaccctctggtggaccccaacagccagtctggaaagggaacagccagcagcggcagaaagcccagatggtacaacctgaagattgccggcgatccctcctgggaagaagagaagaagaagtgggaagaagataagaaaaaggacccgctggccaagatcctgggcaagctggctgagtacggactgatccctctgttcatcccctacaccgacagcaacgagcccatcgtgaaagaaatcaagtggatggaaaagtcccggaaccagagcgtgcggcggctggataaggacatgttcattcaggccctggaacggttcctgagctgggagagctggaacctgaaagtgaaagaggaatacgagaaggtcgagaaagagtacaagaccctggaagagaggatcaaaggaggctctggaggaagctccgaagtcgagttttcccatgagtactggatgagacacgcattgactctcgcaaagagggctcgagatgaacgcgaggtgcccgtgggggcagtactcgtgctcaacaatcgcgtaatcggcgaaggttggaatagggcaatcggactccacgaccccactgcacatgcggaaatcatggcccttcgacagggagggcttgtgatgcagaattatcgactttatgatgcgacgctgtacgtcacgtttgaaccttgcgtaatgtgcgcgggagctatgattcactcccgcattggacgagttgtattcggtgttcgcaacgccaagacgggtgccgcaggttcactgatggacgtgctgcatcatccaggcatgaaccaccgggtagaaatcacagaaggcatattggcggacgaatgtgcggcgctgttgtgtcgtttttttcgcatgcccaggcgggtctttaacgcccagaaaaaagcacaatcctctactgacggctcttctggatctgaaacacctggcacaagcgagagcgccacccctgagagctctggcgaggacatccaggctctgaaggctctggaacagtatgagaaagagcggcaagaacagctgctgcgggacaccctgaacaccaacgagtaccggctgagcaagagaggccttagaggctggcgggaaatcatccagaaatggctgaaaatggacgagaacgagccctccgagaagtacctggaagtgttcaaggactaccagcggaagcaccctagagaggccggcgattacagcgtgtacgagttcctgtccaagaaagagaaccacttcatctggcggaatcaccctgagtacccctacctgtacgccaccttctgcgagatcgacaagaaaaagaaggacgccaagcagcaggccaccttcacactggccgatcctatcaatcaccctctgtgggtccgattcgaggaaagaagcggcagcaacctgaacaagtacagaatcctgaccgagcagctgcacaccgagaagctgaagaaaaagctgacagtgcagctggaccggctgatctaccctacagaatctggcggctgggaagagaagggcaaagtggacattgtgctgctgcccagccggcagttctacaaccagatcttcctggacatcgaggaaaagggcaagcacgccttcacctacaaggatgagagcatcaagttccctctgaagggcacactcggcggagccagagtgcagttcgacagagatcacctgagaagataccctcacaaggtggaaagcggcaacgtgggcagaatctacttcaacatgaccgtgaacatcgagcctacagagtccccagtgtccaagtctctgaagatccaccgggacgacttccccaaggtggtcaacttcaagcccaaagaactgaccgagtggatcaaggacagcaagggcaagaaactgaagtccggcatcgagtccctggaaatcggcctgagagtgatgagcatcgacctgggacagagacaggccgctgccgcctctattttcgaggtggtggatcagaagcccgacatcgaaggcaagctgtttttcccaatcaagggcaccgagctgtatgccgtgcacagagccagcttcaacatcaagctgcccggcgagacactggtcaagagcagagaagtgctgcggaaggccagagaggacaatctgaaactgatgaaccagaagctcaacttcctgcggaacgtgctgcacttccagcagttcgaggacatcaccgagagagagaagcgggtcaccaagtggatcagcagacaagagaacagcgacgtgcccctggtgtaccaggatgagctgatccagatccgcgagctgatgtacaagccttacaaggactgggtcgccttcctgaagcagctccacaagagactggaagtcgagatcggcaaagaagtgaagcactggcggaagtccctgagcgacggaagaaagggcctgtacggcatctccctgaagaacatcgacgagatcgatcggacccggaagttcctgctgagatggtccctgaggcctaccgaacctggcgaagtgcgtagactggaacccggccagagattcgccatcgaccagctgaatcacctgaacgccctgaaagaagatcggctgaagaagatggccaacaccatcatcatgcacgccctgggctactgctacgacgtgcggaagaagaaatggcaggctaagaaccccgcctgccagatcatcctgttcgaggatctgagcaactacaacccctacgaggaaaggtcccgcttcgagaacagcaagctcatgaagtggtccagacgcgagatccccagacaggttgcactgcagggcgagatctatggcctgcaagtgggagaagtgggcgctcagttcagcagcagattccacgccaagacaggcagccctggcatcagatgtagcgtcgtgaccaaagagaagctgcaggacaatcggttcttcaagaatctgcagagagagggcagactgaccctggacaaaatcgccgtgctgaaagagggcgatctgtacccagacaaaggcggcgagaagttcatcagcctgagcaaggatcggaagtgcgtgaccacacacgccgacatcaacgccgctcagaacctgcagaagcggttctggacaagaacccacggcttctacaaggtgtactgcaaggcctaccaggtggacggccagaccgtgtacatccctgagagcaaggaccagaagcagaagatcatcgaagagttcggcgagggctacttcattctgaaggacggggtgtacgaatgggtcaacgccggcaagctgaaaatcaagaagggcagctccaagcagagcagcagcgagctggtggatagcgacatcctgaaagacagcttcgacctggcctccgagctgaaaggcgaaaagctgatgctgtacagggaccccagcggcaatgtgttccccagcgacaaatggatggccgctggcgtgttcttcggaaagctggaacgcatcctgatcagcaagctgaccaaccagtactccatcagcaccatcgaggacgacagcagcaagcagtctatgaaaaggccggcggccacgaaaaaggccggccaggcaaaaaagaaaaagggatcctacccatacgatgttccagattacgcttatccctacgacgtgcctgattatgcatacccatatgatgtccccgactatgcctaa

SEQ ID NO: 5 - protein, 1361 aa, synthetic construct
  REGION 1..1361: note = BhCas12b GGSGGS-ABE8-Xten20at K255 polypeptide sequence
MAPKKKRKVGIHGVPAAATRSFILKIEPNEEVKKGLWKTHEVLNHGIAYYMNILKLIRQEAIYEHHEQDPKNPKKVSKAEIQAELWDFVLKMQKCNSFTHEVDKDEVFNILRELYEELVPSSVEKKGEANQLSNKFLYPLVDPNSQSGKGTASSGRKPRWYNLKIAGDPSWEEEKKKWEEDKKKDPLAKILGKLAEYGLIPLFIPYTDSNEPIVKEIKWMEKSRNQSVRRLDKDMFIQALERFLSWESWNLKVKEEYEKVEKEYKTLEERIKGGSGGSSEVEFSHEYWMRHALTLAKRARDEREVPVGAVLVLNNRVIGEGWNRAIGLHDPTAHAEIMALRQGGLVMQNYRLYDATLYVTFEPCVMCAGAMIHSRIGRVVFGVRNAKTGAAGSLMDVLHHPGMNHRVEITEGILADECAALLCRFFRMPRRVFNAQKKAQSSTDGSSGSETPGTSESATPESSGEDIQALKALEQYEKERQEQLLRDTLNTNEYRLSKRGLRGWREIIQKWLKMDENEPSEKYLEVFKDYQRKHPREAGDYSVYEFLSKKENHFIWRNHPEYPYLYATFCEIDKKKKDAKQQATFTLADPINHPLWVRFEERSGSNLNKYRILTEQLHTEKLKKKLTVQLDRLIYPTESGGWEEKGKVDIVLLPSRQFYNQIFLDIEEKGKHAFTYKDESIKFPLKGTLGGARVQFDRDHLRRYPHKVESGNVGRIYFNMTVNIEPTESPVSKSLKIHRDDFPKVVNFKPKELTEWIKDSKGKKLKSGIESLEIGLRVMSIDLGQRQAAAASIFEVVDQKPDIEGKLFFPIKGTELYAVHRASFNIKLPGETLVKSREVLRKAREDNLKLMNQKLNFLRNVLHFQQFEDITEREKRVTKWISRQENSDVPLVYQDELIQIRELMYKPYKDWVAFLKQLHKRLEVEIGKEVKHWRKSLSDGRKGLYGISLKNIDEIDRTRKFLLRWSLRPTEPGEVRRLEPGQRFAIDQLNHLNALKEDRLKKMANTIIMHALGYCYDVRKKKWQAKNPACQIILFEDLSNYNPYEERSRFENSKLMKWSRREIPRQVALQGEIYGLQVGEVGAQFSSRFHAKTGSPGIRCSVVTKEKLQDNRFFKNLQREGRLTLDKIAVLKEGDLYPDKGGEKFISLSKDRKCVTTHADINAAQNLQKRFWTRTHGFYKVYCKAYQVDGQTVYIPESKDQKQKIIEEFGEGYFILKDGVYEWVNAGKLKIKKGSSKQSSSELVDSDILKDSFDLASELKGEKLMLYRDPSGNVFPSDKWMAAGVFFGKLERILISKLTNQYSISTIEDDSSKQSMKRPAATKKAGQAKKKKGSYPYDVPDYAYPYDVPDYAYPYDVPDYA

SEQ ID NO: 6 - DNA, 4092 bp, synthetic construct
  misc_feature 1..4092: note = BhCas12b GGSGGS-ABE8-Xten20at D306 polynucleotide sequence
  misc_feature 1..6: note = Kozak sequence
  misc_feature 7..57: note = Sequence encoding N-terminal nuclear localization signal (NLS)
  misc_feature 58..975: note = Sequence encoding BhCas12b
  misc_feature 976..993: note = Sequence encoding a linker
  misc_feature 994..1491: note = Sequence encoding TadA*8
  misc_feature 1492..1551: note = Sequence encoding Xten20 linker
  misc_feature 1552..3954: note = Sequence encoding BhCas12b
  misc_feature 3955..4002: note = Sequence encoding C-terminal NLS
  misc_feature 4003..4008: note = Sequence encoding a GS linker
  misc_feature 4009..4089: note = Sequence encoding 3x hemagglutinin (HA) tag
  source 1..4092: mol_type = other DNA
gccaccatggccccaaagaagaagcggaaggtcggtatccacggagtcccagcagccgccaccagatccttcatcctgaagatcgagcccaacgaggaagtgaagaaaggcctctggaaaacccacgaggtgctgaaccacggaatcgcctactacatgaatatcctgaagctgatccggcaagaggccatctacgagcaccacgagcaggaccccaagaatcccaagaaggtgtccaaggccgagatccaggccgagctgtgggatttcgtgctgaagatgcagaagtgcaacagcttcacacacgaggtggacaaggacgaggtgttcaacatcctgagagagctgtacgaggaactggtgcccagcagcgtggaaaagaagggcgaagccaaccagctgagcaacaagtttctgtaccctctggtggaccccaacagccagtctggaaagggaacagccagcagcggcagaaagcccagatggtacaacctgaagattgccggcgatccctcctgggaagaagagaagaagaagtgggaagaagataagaaaaaggacccgctggccaagatcctgggcaagctggctgagtacggactgatccctctgttcatcccctacaccgacagcaacgagcccatcgtgaaagaaatcaagtggatggaaaagtcccggaaccagagcgtgcggcggctggataaggacatgttcattcaggccctggaacggttcctgagctgggagagctggaacctgaaagtgaaagaggaatacgagaaggtcgagaaagagtacaagaccctggaagagaggatcaaagaggacatccaggctctgaaggctctggaacagtatgagaaagagcggcaagaacagctgctgcgggacaccctgaacaccaacgagtaccggctgagcaagagaggccttagaggctggcgggaaatcatccagaaatggctgaaaatggacggaggctctggaggaagctccgaagtcgagttttcccatgagtactggatgagacacgcattgactctcgcaaagagggctcgagatgaacgcgaggtgcccgtgggggcagtactcgtgctcaacaatcgcgtaatcggcgaaggttggaatagggcaatcggactccacgaccccactgcacatgcggaaatcatggcccttcgacagggagggcttgtgatgcagaattatcgactttatgatgcgacgctgtacgtcacgtttgaaccttgcgtaatgtgcgcgggagctatgattcactcccgcattggacgagttgtattcggtgttcgcaacgccaagacgggtgccgcaggttcactgatggacgtgctgcatcatccaggcatgaaccaccgggtagaaatcacagaaggcatattggcggacgaatgtgcggcgctgttgtgtcgtttttttcgcatgcccaggcgggtctttaacgcccagaaaaaagcacaatcctctactgacggctcttctggatctgaaacacctggcacaagcgagagcgccacccctgagagctctggcgagaacgagccctccgagaagtacctggaagtgttcaaggactaccagcggaagcaccctagagaggccggcgattacagcgtgtacgagttcctgtccaagaaagagaaccacttcatctggcggaatcaccctgagtacccctacctgtacgccaccttctgcgagatcgacaagaaaaagaaggacgccaagcagcaggccaccttcacactggccgatcctatcaatcaccctctgtgggtccgattcgaggaaagaagcggcagcaacctgaacaagtacagaatcctgaccgagcagctgcacaccgagaagctgaagaaaaagctgacagtgcagctggaccggctgatctaccctacagaatctggcggctgggaagagaagggcaaagtggacattgtgctgctgcccagccggcagttctacaaccagatcttcctggacatcgaggaaaagggcaagcacgccttcacctacaaggatgagagcatcaagttccctctgaagggcacactcggcggagccagagtgcagttcgacagagatcacctgagaagataccctcacaaggtggaaagcggcaacgtgggcagaatctacttcaacatgaccgtgaacatcgagcctacagagtccccagtgtccaagtctctgaagatccaccgggacgacttccccaaggtggtcaacttcaagcccaaagaactgaccgagtggatcaaggacagcaagggcaagaaactgaagtccggcatcgagtccctggaaatcggcctgagagtgatgagcatcgacctgggacagagacaggccgctgccgcctctattttcgaggtggtggatcagaagcccgacatcgaaggcaagctgtttttcccaatcaagggcaccgagctgtatgccgtgcacagagccagcttcaacatcaagctgcccggcgagacactggtcaagagcagagaagtgctgcggaaggccagagaggacaatctgaaactgatgaaccagaagctcaacttcctgcggaacgtgctgcacttccagcagttcgaggacatcaccgagagagagaagcgggtcaccaagtggatcagcagacaagagaacagcgacgtgcccctggtgtaccaggatgagctgatccagatccgcgagctgatgtacaagccttacaaggactgggtcgccttcctgaagcagctccacaagagactggaagtcgagatcggcaaagaagtgaagcactggcggaagtccctgagcgacggaagaaagggcctgtacggcatctccctgaagaacatcgacgagatcgatcggacccggaagttcctgctgagatggtccctgaggcctaccgaacctggcgaagtgcgtagactggaacccggccagagattcgccatcgaccagctgaatcacctgaacgccctgaaagaagatcggctgaagaagatggccaacaccatcatcatgcacgccctgggctactgctacgacgtgcggaagaagaaatggcaggctaagaaccccgcctgccagatcatcctgttcgaggatctgagcaactacaacccctacgaggaaaggtcccgcttcgagaacagcaagctcatgaagtggtccagacgcgagatccccagacaggttgcactgcagggcgagatctatggcctgcaagtgggagaagtgggcgctcagttcagcagcagattccacgccaagacaggcagccctggcatcagatgtagcgtcgtgaccaaagagaagctgcaggacaatcggttcttcaagaatctgcagagagagggcagactgaccctggacaaaatcgccgtgctgaaagagggcgatctgtacccagacaaaggcggcgagaagttcatcagcctgagcaaggatcggaagtgcgtgaccacacacgccgacatcaacgccgctcagaacctgcagaagcggttctggacaagaacccacggcttctacaaggtgtactgcaaggcctaccaggtggacggccagaccgtgtacatccctgagagcaaggaccagaagcagaagatcatcgaagagttcggcgagggctacttcattctgaaggacggggtgtacgaatgggtcaacgccggcaagctgaaaatcaagaagggcagctccaagcagagcagcagcgagctggtggatagcgacatcctgaaagacagcttcgacctggcctccgagctgaaaggcgaaaagctgatgctgtacagggaccccagcggcaatgtgttccccagcgacaaatggatggccgctggcgtgttcttcggaaagctggaacgcatcctgatcagcaagctgaccaaccagtactccatcagcaccatcgaggacgacagcagcaagcagtctatgaaaaggccggcggccacgaaaaaggccggccaggcaaaaaagaaaaagggatcctacccatacgatgttccagattacgcttatccctacgacgtgcctgattatgcatacccatatgatgtccccgactatgcctaa

SEQ ID NO: 7 - protein, 1361 aa, synthetic construct
  REGION 1..1361: note = BhCas12b GGSGGS-ABE8-Xten20at D306 polypeptide sequence
MAPKKKRKVGIHGVPAAATRSFILKIEPNEEVKKGLWKTHEVLNHGIAYYMNILKLIRQEAIYEHHEQDPKNPKKVSKAEIQAELWDFVLKMQKCNSFTHEVDKDEVFNILRELYEELVPSSVEKKGEANQLSNKFLYPLVDPNSQSGKGTASSGRKPRWYNLKIAGDPSWEEEKKKWEEDKKKDPLAKILGKLAEYGLIPLFIPYTDSNEPIVKEIKWMEKSRNQSVRRLDKDMFIQALERFLSWESWNLKVKEEYEKVEKEYKTLEERIKEDIQALKALEQYEKERQEQLLRDTLNTNEYRLSKRGLRGWREIIQKWLKMDGGSGGSSEVEFSHEYWMRHALTLAKRARDEREVPVGAVLVLNNRVIGEGWNRAIGLHDPTAHAEIMALRQGGLVMQNYRLYDATLYVTFEPCVMCAGAMIHSRIGRVVFGVRNAKTGAAGSLMDVLHHPGMNHRVEITEGILADECAALLCRFFRMPRRVFNAQKKAQSSTDGSSGSETPGTSESATPESSGENEPSEKYLEVFKDYQRKHPREAGDYSVYEFLSKKENHFIWRNHPEYPYLYATFCEIDKKKKDAKQQATFTLADPINHPLWVRFEERSGSNLNKYRILTEQLHTEKLKKKLTVQLDRLIYPTESGGWEEKGKVDIVLLPSRQFYNQIFLDIEEKGKHAFTYKDESIKFPLKGTLGGARVQFDRDHLRRYPHKVESGNVGRIYFNMTVNIEPTESPVSKSLKIHRDDFPKVVNFKPKELTEWIKDSKGKKLKSGIESLEIGLRVMSIDLGQRQAAAASIFEVVDQKPDIEGKLFFPIKGTELYAVHRASFNIKLPGETLVKSREVLRKAREDNLKLMNQKLNFLRNVLHFQQFEDITEREKRVTKWISRQENSDVPLVYQDELIQIRELMYKPYKDWVAFLKQLHKRLEVEIGKEVKHWRKSLSDGRKGLYGISLKNIDEIDRTRKFLLRWSLRPTEPGEVRRLEPGQRFAIDQLNHLNALKEDRLKKMANTIIMHALGYCYDVRKKKWQAKNPACQIILFEDLSNYNPYEERSRFENSKLMKWSRREIPRQVALQGEIYGLQVGEVGAQFSSRFHAKTGSPGIRCSVVTKEKLQDNRFFKNLQREGRLTLDKIAVLKEGDLYPDKGGEKFISLSKDRKCVTTHADINAAQNLQKRFWTRTHGFYKVYCKAYQVDGQTVYIPESKDQKQKIIEEFGEGYFILKDGVYEWVNAGKLKIKKGSSKQSSSELVDSDILKDSFDLASELKGEKLMLYRDPSGNVFPSDKWMAAGVFFGKLERILISKLTNQYSISTIEDDSSKQSMKRPAATKKAGQAKKKKGSYPYDVPDYAYPYDVPDYAYPYDVPDYA

SEQ ID NO: 8 - DNA, 4092 bp, synthetic construct
  misc_feature 1..4092: note = BhCas12b GGSGGS-ABE8-Xten20at D980 polynucleotide sequence
  misc_feature 1..6: note = Kozak sequence
  misc_feature 7..57: note = Sequence encoding N-terminal nuclear localization signal (NLS)
  misc_feature 58..2997: note = Sequence encoding BhCas12b
  misc_feature 2998..3015: note = Sequence encoding a linker
  misc_feature 3016..3513: note = Sequence encoding TadA*8
  misc_feature 3514..3573: note = Sequence encoding Xten20 linker
  misc_feature 3574..3954: note = Sequence encoding BhCas12b
  misc_feature 3955..4002: note = Sequence encoding C-terminal NLS
  misc_feature 4003..4008: note = Sequence encoding a GS linker
  misc_feature 4009..4089: note = Sequence encoding 3x hemagglutinin (HA) tag
  source 1..4092: mol_type = other DNA
gccaccatggccccaaagaagaagcggaaggtcggtatccacggagtcccagcagccgccaccagatccttcatcctgaagatcgagcccaacgaggaagtgaagaaaggcctctggaaaacccacgaggtgctgaaccacggaatcgcctactacatgaatatcctgaagctgatccggcaagaggccatctacgagcaccacgagcaggaccccaagaatcccaagaaggtgtccaaggccgagatccaggccgagctgtgggatttcgtgctgaagatgcagaagtgcaacagcttcacacacgaggtggacaaggacgaggtgttcaacatcctgagagagctgtacgaggaactggtgcccagcagcgtggaaaagaagggcgaagccaaccagctgagcaacaagtttctgtaccctctggtggaccccaacagccagtctggaaagggaacagccagcagcggcagaaagcccagatggtacaacctgaagattgccggcgatccctcctgggaagaagagaagaagaagtgggaagaagataagaaaaaggacccgctggccaagatcctgggcaagctggctgagtacggactgatccctctgttcatcccctacaccgacagcaacgagcccatcgtgaaagaaatcaagtggatggaaaagtcccggaaccagagcgtgcggcggctggataaggacatgttcattcaggccctggaacggttcctgagctgggagagctggaacctgaaagtgaaagaggaatacgagaaggtcgagaaagagtacaagaccctggaagagaggatcaaagaggacatccaggctctgaaggctctggaacagtatgagaaagagcggcaagaacagctgctgcgggacaccctgaacaccaacgagtaccggctgagcaagagaggccttagaggctggcgggaaatcatccagaaatggctgaaaatggacgagaacgagccctccgagaagtacctggaagtgttcaaggactaccagcggaagcaccctagagaggccggcgattacagcgtgtacgagttcctgtccaagaaagagaaccacttcatctggcggaatcaccctgagtacccctacctgtacgccaccttctgcgagatcgacaagaaaaagaaggacgccaagcagcaggccaccttcacactggccgatcctatcaatcaccctctgtgggtccgattcgaggaaagaagcggcagcaacctgaacaagtacagaatcctgaccgagcagctgcacaccgagaagctgaagaaaaagctgacagtgcagctggaccggctgatctaccctacagaatctggcggctgggaagagaagggcaaagtggacattgtgctgctgcccagccggcagttctacaaccagatcttcctggacatcgaggaaaagggcaagcacgccttcacctacaaggatgagagcatcaagttccctctgaagggcacactcggcggagccagagtgcagttcgacagagatcacctgagaagataccctcacaaggtggaaagcggcaacgtgggcagaatctacttcaacatgaccgtgaacatcgagcctacagagtccccagtgtccaagtctctgaagatccaccgggacgacttccccaaggtggtcaacttcaagcccaaagaactgaccgagtggatcaaggacagcaagggcaagaaactgaagtccggcatcgagtccctggaaatcggcctgagagtgatgagcatcgacctgggacagagacaggccgctgccgcctctattttcgaggtggtggatcagaagcccgacatcgaaggcaagctgtttttcccaatcaagggcaccgagctgtatgccgtgcacagagccagcttcaacatcaagctgcccggcgagacactggtcaagagcagagaagtgctgcggaaggccagagaggacaatctgaaactgatgaaccagaagctcaacttcctgcggaacgtgctgcacttccagcagttcgaggacatcaccgagagagagaagcgggtcaccaagtggatcagcagacaagagaacagcgacgtgcccctggtgtaccaggatgagctgatccagatccgcgagctgatgtacaagccttacaaggactgggtcgccttcctgaagcagctccacaagagactggaagtcgagatcggcaaagaagtgaagcactggcggaagtccctgagcgacggaagaaagggcctgtacggcatctccctgaagaacatcgacgagatcgatcggacccggaagttcctgctgagatggtccctgaggcctaccgaacctggcgaagtgcgtagactggaacccggccagagattcgccatcgaccagctgaatcacctgaacgccctgaaagaagatcggctgaagaagatggccaacaccatcatcatgcacgccctgggctactgctacgacgtgcggaagaagaaatggcaggctaagaaccccgcctgccagatcatcctgttcgaggatctgagcaactacaacccctacgaggaaaggtcccgcttcgagaacagcaagctcatgaagtggtccagacgcgagatccccagacaggttgcactgcagggcgagatctatggcctgcaagtgggagaagtgggcgctcagttcagcagcagattccacgccaagacaggcagccctggcatcagatgtagcgtcgtgaccaaagagaagctgcaggacaatcggttcttcaagaatctgcagagagagggcagactgaccctggacaaaatcgccgtgctgaaagagggcgatctgtacccagacaaaggcggcgagaagttcatcagcctgagcaaggatcggaagtgcgtgaccacacacgccgacatcaacgccgctcagaacctgcagaagcggttctggacaagaacccacggcttctacaaggtgtactgcaaggcctaccaggtggacggaggctctggaggaagctccgaagtcgagttttcccatgagtactggatgagacacgcattgactctcgcaaagagggctcgagatgaacgcgaggtgcccgtgggggcagtactcgtgctcaacaatcgcgtaatcggcgaaggttggaatagggcaatcggactccacgaccccactgcacatgcggaaatcatggcccttcgacagggagggcttgtgatgcagaattatcgactttatgatgcgacgctgtacgtcacgtttgaaccttgcgtaatgtgcgcgggagctatgattcactcccgcattggacgagttgtattcggtgttcgcaacgccaagacgggtgccgcaggttcactgatggacgtgctgcatcatccaggcatgaaccaccgggtagaaatcacagaaggcatattggcggacgaatgtgcggcgctgttgtgtcgtttttttcgcatgcccaggcgggtctttaacgcccagaaaaaagcacaatcctctactgacggctcttctggatctgaaacacctggcacaagcgagagcgccacccctgagagctctggcggccagaccgtgtacatccctgagagcaaggaccagaagcagaagatcatcgaagagttcggcgagggctacttcattctgaaggacggggtgtacgaatgggtcaacgccggcaagctgaaaatcaagaagggcagctccaagcagagcagcagcgagctggtggatagcgacatcctgaaagacagcttcgacctggcctccgagctgaaaggcgaaaagctgatgctgtacagggaccccagcggcaatgtgttccccagcgacaaatggatggccgctggcgtgttcttcggaaagctggaacgcatcctgatcagcaagctgaccaaccagtactccatcagcaccatcgaggacgacagcagcaagcagtctatgaaaaggccggcggccacgaaaaaggccggccaggcaaaaaagaaaaagggatcctacccatacgatgttccagattacgcttatccctacgacgtgcctgattatgcatacccatatgatgtccccgactatgcctaa

SEQ ID NO: 9 - protein, 1361 aa, synthetic construct
  REGION 1..1361: note = BhCas12b GGSGGS-ABE8-Xten20at D980 polypeptide sequence
MAPKKKRKVGIHGVPAAATRSFILKIEPNEEVKKGLWKTHEVLNHGIAYYMNILKLIRQEAIYEHHEQDPKNPKKVSKAEIQAELWDFVLKMQKCNSFTHEVDKDEVFNILRELYEELVPSSVEKKGEANQLSNKFLYPLVDPNSQSGKGTASSGRKPRWYNLKIAGDPSWEEEKKKWEEDKKKDPLAKILGKLAEYGLIPLFIPYTDSNEPIVKEIKWMEKSRNQSVRRLDKDMFIQALERFLSWESWNLKVKEEYEKVEKEYKTLEERIKEDIQALKALEQYEKERQEQLLRDTLNTNEYRLSKRGLRGWREIIQKWLKMDENEPSEKYLEVFKDYQRKHPREAGDYSVYEFLSKKENHFIWRNHPEYPYLYATFCEIDKKKKDAKQQATFTLADPINHPLWVRFEERSGSNLNKYRILTEQLHTEKLKKKLTVQLDRLIYPTESGGWEEKGKVDIVLLPSRQFYNQIFLDIEEKGKHAFTYKDESIKFPLKGTLGGARVQFDRDHLRRYPHKVESGNVGRIYFNMTVNIEPTESPVSKSLKIHRDDFPKVVNFKPKELTEWIKDSKGKKLKSGIESLEIGLRVMSIDLGQRQAAAASIFEVVDQKPDIEGKLFFPIKGTELYAVHRASFNIKLPGETLVKSREVLRKAREDNLKLMNQKLNFLRNVLHFQQFEDITEREKRVTKWISRQENSDVPLVYQDELIQIRELMYKPYKDWVAFLKQLHKRLEVEIGKEVKHWRKSLSDGRKGLYGISLKNIDEIDRTRKFLLRWSLRPTEPGEVRRLEPGQRFAIDQLNHLNALKEDRLKKMANTIIMHALGYCYDVRKKKWQAKNPACQIILFEDLSNYNPYEERSRFENSKLMKWSRREIPRQVALQGEIYGLQVGEVGAQFSSRFHAKTGSPGIRCSVVTKEKLQDNRFFKNLQREGRLTLDKIAVLKEGDLYPDKGGEKFISLSKDRKCVTTHADINAAQNLQKRFWTRTHGFYKVYCKAYQVDGGSGGSSEVEFSHEYWMRHALTLAKRARDEREVPVGAVLVLNNRVIGEGWNRAIGLHDPTAHAEIMALRQGGLVMQNYRLYDATLYVTFEPCVMCAGAMIHSRIGRVVFGVRNAKTGAAGSLMDVLHHPGMNHRVEITEGILADECAALLCRFFRMPRRVFNAQKKAQSSTDGSSGSETPGTSESATPESSGGQTVYIPESKDQKQKIIEEFGEGYFILKDGVYEWVNAGKLKIKKGSSKQSSSELVDSDILKDSFDLASELKGEKLMLYRDPSGNVFPSDKWMAAGVFFGKLERILISKLTNQYSISTIEDDSSKQSMKRPAATKKAGQAKKKKGSYPYDVPDYAYPYDVPDYAYPYDVPDYA

SEQ ID NO: 10 - DNA, 4092 bp, synthetic construct
  misc_feature 1..4092: note = BhCas12b GGSGGS-ABE8-Xten20at K1019 polynucleotide sequence
  misc_feature 1..6: note = Kozak sequence
  misc_feature 7..57: note = Sequence encoding N-terminal nuclear localization signal (NLS)
  misc_feature 58..3114: note = Sequence encoding BhCas12b
  misc_feature 3115..3132: note = Sequence encoding a linker
  misc_feature 3133..3630: note = Sequence encoding TadA*8
  misc_feature 3631..3690: note = Sequence encoding Xten20 linker
  misc_feature 3691..3954: note = Sequence encoding BhCas12b
  misc_feature 3955..4002: note = Sequence encoding C-terminal NLS
  misc_feature 4003..4008: note = Sequence encoding GS linker
  misc_feature 4009..4089: note = Sequence encoding 3x hemagglutinin (HA) tag
  source 1..4092: mol_type = other DNA
gccaccatggccccaaagaagaagcggaaggtcggtatccacggagtcccagcagccgccaccagatccttcatcctgaagatcgagcccaacgaggaagtgaagaaaggcctctggaaaacccacgaggtgctgaaccacggaatcgcctactacatgaatatcctgaagctgatccggcaagaggccatctacgagcaccacgagcaggaccccaagaatcccaagaaggtgtccaaggccgagatccaggccgagctgtgggatttcgtgctgaagatgcagaagtgcaacagcttcacacacgaggtggacaaggacgaggtgttcaacatcctgagagagctgtacgaggaactggtgcccagcagcgtggaaaagaagggcgaagccaaccagctgagcaacaagtttctgtaccctctggtggaccccaacagccagtctggaaagggaacagccagcagcggcagaaagcccagatggtacaacctgaagattgccggcgatccctcctgggaagaagagaagaagaagtgggaagaagataagaaaaaggacccgctggccaagatcctgggcaagctggctgagtacggactgatccctctgttcatcccctacaccgacagcaacgagcccatcgtgaaagaaatcaagtggatggaaaagtcccggaaccagagcgtgcggcggctggataaggacatgttcattcaggccctggaacggttcctgagctgggagagctggaacctgaaagtgaaagaggaatacgagaaggtcgagaaagagtacaagaccctggaagagaggatcaaagaggacatccaggctctgaaggctctggaacagtatgagaaagagcggcaagaacagctgctgcgggacaccctgaacaccaacgagtaccggctgagcaagagaggccttagaggctggcgggaaatcatccagaaatggctgaaaatggacgagaacgagccctccgagaagtacctggaagtgttcaaggactaccagcggaagcaccctagagaggccggcgattacagcgtgtacgagttcctgtccaagaaagagaaccacttcatctggcggaatcaccctgagtacccctacctgtacgccaccttctgcgagatcgacaagaaaaagaaggacgccaagcagcaggccaccttcacactggccgatcctatcaatcaccctctgtgggtccgattcgaggaaagaagcggcagcaacctgaacaagtacagaatcctgaccgagcagctgcacaccgagaagctgaagaaaaagctgacagtgcagctggaccggctgatctaccctacagaatctggcggctgggaagagaagggcaaagtggacattgtgctgctgcccagccggcagttctacaaccagatcttcctggacatcgaggaaaagggcaagcacgccttcacctacaaggatgagagcatcaagttccctctgaagggcacactcggcggagccagagtgcagttcgacagagatcacctgagaagataccctcacaaggtggaaagcggcaacgtgggcagaatctacttcaacatgaccgtgaacatcgagcctacagagtccccagtgtccaagtctctgaagatccaccgggacgacttccccaaggtggtcaacttcaagcccaaagaactgaccgagtggatcaaggacagcaagggcaagaaactgaagtccggcatcgagtccctggaaatcggcctgagagtgatgagcatcgacctgggacagagacaggccgctgccgcctctattttcgaggtggtggatcagaagcccgacatcgaaggcaagctgtttttcccaatcaagggcaccgagctgtatgccgtgcacagagccagcttcaacatcaagctgcccggcgagacactggtcaagagcagagaagtgctgcggaaggccagagaggacaatctgaaactgatgaaccagaagctcaacttcctgcggaacgtgctgcacttccagcagttcgaggacatcaccgagagagagaagcgggtcaccaagtggatcagcagacaagagaacagcgacgtgcccctggtgtaccaggatgagctgatccagatccgcgagctgatgtacaagccttacaaggactgggtcgccttcctgaagcagctccacaagagactggaagtcgagatcggcaaagaagtgaagcactggcggaagtccctgagcgacggaagaaagggcctgtacggcatctccctgaagaacatcgacgagatcgatcggacccggaagttcctgctgagatggtccctgaggcctaccgaacctggcgaagtgcgtagactggaacccggccagagattcgccatcgaccagctgaatcacctgaacgccctgaaagaagatcggctgaagaagatggccaacaccatcatcatgcacgccctgggctactgctacgacgtgcggaagaagaaatggcaggctaagaaccccgcctgccagatcatcctgttcgaggatctgagcaactacaacccctacgaggaaaggtcccgcttcgagaacagcaagctcatgaagtggtccagacgcgagatccccagacaggttgcactgcagggcgagatctatggcctgcaagtgggagaagtgggcgctcagttcagcagcagattccacgccaagacaggcagccctggcatcagatgtagcgtcgtgaccaaagagaagctgcaggacaatcggttcttcaagaatctgcagagagagggcagactgaccctggacaaaatcgccgtgctgaaagagggcgatctgtacccagacaaaggcggcgagaagttcatcagcctgagcaaggatcggaagtgcgtgaccacacacgccgacatcaacgccgctcagaacctgcagaagcggttctggacaagaacccacggcttctacaaggtgtactgcaaggcctaccaggtggacggccagaccgtgtacatccctgagagcaaggaccagaagcagaagatcatcgaagagttcggcgagggctacttcattctgaaggacggggtgtacgaatgggtcaacgccggcaagggaggctctggaggaagctccgaagtcgagttttcccatgagtactggatgagacacgcattgactctcgcaaagagggctcgagatgaacgcgaggtgcccgtgggggcagtactcgtgctcaacaatcgcgtaatcggcgaaggttggaatagggcaatcggactccacgaccccactgcacatgcggaaatcatggcccttcgacagggagggcttgtgatgcagaattatcgactttatgatgcgacgctgtacgtcacgtttgaaccttgcgtaatgtgcgcgggagctatgattcactcccgcattggacgagttgtattcggtgttcgcaacgccaagacgggtgccgcaggttcactgatggacgtgctgcatcatccaggcatgaaccaccgggtagaaatcacagaaggcatattggcggacgaatgtgcggcgctgttgtgtcgtttttttcgcatgcccaggcgggtctttaacgcccagaaaaaagcacaatcctctactgacggctcttctggatctgaaacacctggcacaagcgagagcgccacccctgagagctctggcctgaaaatcaagaagggcagctccaagcagagcagcagcgagctggtggatagcgacatcctgaaagacagcttcgacctggcctccgagctgaaaggcgaaaagctgatgctgtacagggaccccagcggcaatgtgttccccagcgacaaatggatggccgctggcgtgttcttcggaaagctggaacgcatcctgatcagcaagctgaccaaccagtactccatcagcaccatcgaggacgacagcagcaagcagtctatgaaaaggccggcggccacgaaaaaggccggccaggcaaaaaagaaaaagggatcctacccatacgatgttccagattacgcttatccctacgacgtgcctgattatgcatacccatatgatgtccccgactatgcctaa

SEQ ID NO: 11 - protein, 1361 aa, synthetic construct
  REGION 1..1361: note = BhCas12b GGSGGS-ABE8-Xten20at K1019 polypeptide sequence
MAPKKKRKVGIHGVPAAATRSFILKIEPNEEVKKGLWKTHEVLNHGIAYYMNILKLIRQEAIYEHHEQDPKNPKKVSKAEIQAELWDFVLKMQKCNSFTHEVDKDEVFNILRELYEELVPSSVEKKGEANQLSNKFLYPLVDPNSQSGKGTASSGRKPRWYNLKIAGDPSWEEEKKKWEEDKKKDPLAKILGKLAEYGLIPLFIPYTDSNEPIVKEIKWMEKSRNQSVRRLDKDMFIQALERFLSWESWNLKVKEEYEKVEKEYKTLEERIKEDIQALKALEQYEKERQEQLLRDTLNTNEYRLSKRGLRGWREIIQKWLKMDENEPSEKYLEVFKDYQRKHPREAGDYSVYEFLSKKENHFIWRNHPEYPYLYATFCEIDKKKKDAKQQATFTLADPINHPLWVRFEERSGSNLNKYRILTEQLHTEKLKKKLTVQLDRLIYPTESGGWEEKGKVDIVLLPSRQFYNQIFLDIEEKGKHAFTYKDESIKFPLKGTLGGARVQFDRDHLRRYPHKVESGNVGRIYFNMTVNIEPTESPVSKSLKIHRDDFPKVVNFKPKELTEWIKDSKGKKLKSGIESLEIGLRVMSIDLGQRQAAAASIFEVVDQKPDIEGKLFFPIKGTELYAVHRASFNIKLPGETLVKSREVLRKAREDNLKLMNQKLNFLRNVLHFQQFEDITEREKRVTKWISRQENSDVPLVYQDELIQIRELMYKPYKDWVAFLKQLHKRLEVEIGKEVKHWRKSLSDGRKGLYGISLKNIDEIDRTRKFLLRWSLRPTEPGEVRRLEPGQRFAIDQLNHLNALKEDRLKKMANTIIMHALGYCYDVRKKKWQAKNPACQIILFEDLSNYNPYEERSRFENSKLMKWSRREIPRQVALQGEIYGLQVGEVGAQFSSRFHAKTGSPGIRCSVVTKEKLQDNRFFKNLQREGRLTLDKIAVLKEGDLYPDKGGEKFISLSKDRKCVTTHADINAAQNLQKRFWTRTHGFYKVYCKAYQVDGQTVYIPESKDQKQKIIEEFGEGYFILKDGVYEWVNAGKGGSGGSSEVEFSHEYWMRHALTLAKRARDEREVPVGAVLVLNNRVIGEGWNRAIGLHDPTAHAEIMALRQGGLVMQNYRLYDATLYVTFEPCVMCAGAMIHSRIGRVVFGVRNAKTGAAGSLMDVLHHPGMNHRVEITEGILADECAALLCRFFRMPRRVFNAQKKAQSSTDGSSGSETPGTSESATPESSGLKIKKGSSKQSSSELVDSDILKDSFDLASELKGEKLMLYRDPSGNVFPSDKWMAAGVFFGKLERILISKLTNQYSISTIEDDSSKQSMKRPAATKKAGQAKKKKGSYPYDVPDYAYPYDVPDYAYPYDVPDYA

SEQ ID NO: 12 - protein, 208 aa, Petromyzon marinus
  REGION 1..208: note = MISC_FEATURE - tr|A5H718|A5H718_PETMA Cytosine deaminase OS=Petromyzon marinusOX=7757 PE=2 SV=1 amino acid sequence; PmCDA1 polypeptide sequence
MTDAEYVRIHEKLDIYTFKKQFFNNKKSVSHRCYVLFELKRRGERRACFWGYAVNKPQSGTERGIHAEIFSIRKVEEYLRDNPGQFTINWYSSWSPCADCAEKILEWYNQELRGNGHTLKIWACKLYYEKNARNQIGLWNLRDNGVGLNVMVSEHYQCCRKIFIQSSHNQLNENRWLEKTLKRAEKRRSELSIMIQVKILHTTKSPAV

SEQ ID NO: 13 - DNA, 766 bp, Petromyzon marinus
  misc_feature 1..766: note = EF094822.1 Petromyzon marinus isolate PmCDA.21 cytosine deaminase mRNA, complete cds; PmCDA1 polynucleotide sequence
  source 1..766: mol_type = genomic DNA
tgacacgacacagccgtgtatatgaggaagggtagctggatggggggggggggaatacgttcagagaggacattagcgagcgtcttgttggtggccttgagtctagacacctgcagacatgaccgacgctgagtacgtgagaatccatgagaagttggacatctacacgtttaagaaacagtttttcaacaacaaaaaatccgtgtcgcatagatgctacgttctctttgaattaaaacgacggggtgaacgtagagcgtgtttttggggctatgctgtgaataaaccacagagcgggacagaacgtggaattcacgccgaaatctttagcattagaaaagtcgaagaatacctgcgcgacaaccccggacaattcacgataaattggtactcatcctggagtccttgtgcagattgcgctgaaaagatcttagaatggtataaccaggagctgcgggggaacggccacactttgaaaatctgggcttgcaaactctattacgagaaaaatgcgaggaatcaaattgggctgtggaacctcagagataacggggttgggttgaatgtaatggtaagtgaacactaccaatgttgcaggaaaatattcatccaatcgtcgcacaatcaattgaatgagaatagatggcttgagaagactttgaagcgagctgaaaaacgacggagcgagttgtccattatgattcaggtaaaaatactccacaccactaagagtcctgctgtttaagaggctatgcggatggttttc

SEQ ID NO: 14 - protein, 145 aa, Homo sapiens
  REGION 1..145: note = MISC_FEATURE - tr|Q6QJ80|Q6QJ80_HUMAN Activation-induced cytidine deaminase OS=Homo sapiens; OX = 9606 GN=AICDA PE=2 SV=1; AID polypeptide sequence
MDSLLMNRRKFLYQFKNVRWAKGRRETYLCYVVKRRDSATSFSLDFGYLRNKNGCHVELLFLRYISDWDLDPGRCYRVTWFTSWSPCYDCARHVADFLRGNPNLSLRIFTARLYFCEDRKAEPEGLRRLHRAGVQIAIMTFKAPV

SEQ ID NO: 15 - DNA, 10681 bp, Homo sapiens
  misc_feature 1..10681: note = NG_011588.1:5001-15681 Homo sapiens activation induced cytidine deaminase (AICDA), RefSeqGene (LRG_17) on chromosome 12; nucleic acid sequence of the CDS of human AID; polynucleotide sequence
  source 1..10681: mol_type = genomic DNA
agagaaccatcattaattgaagtgagatttttctggcctgagacttgcagggaggcaagaagacactctggacaccactatggacaggtaaagaggcagtcttctcgtgggtgattgcactggccttcctctcagagcaaatctgagtaatgagactggtagctatccctttctctcatgtaactgtctgactgataagatcagcttgatcaatatgcatatatattttttgatctgtctccttttcttctattcagatcttatacgctgtcagcccaattctttctgtttcagacttctcttgatttccctctttttcatgtggcaaaagaagtagtgcgtacaatgtactgattcgtcctgagatttgtaccatggttgaaactaatttatggtaataatattaacatagcaaatctttagagactcaaatcatgaaaaggtaatagcagtactgtactaaaaacggtagtgctaattttcgtaataattttgtaaatattcaacagtaaaacaacttgaagacacactttcctagggaggcgttactgaaataatttagctatagtaagaaaatttgtaattttagaaatgccaagcattctaaattaattgcttgaaagtcactatgattgtgtccattataaggagacaaattcattcaagcaagttatttaatgttaaaggcccaattgttaggcagttaatggcacttttactattaactaatctttccatttgttcagacgtagcttaacttacctcttaggtgtgaatttggttaaggtcctcataatgtctttatgtgcagtttttgataggttattgtcatagaacttattctattcctacatttatgattactatggatgtatgagaataacacctaatccttatactttacctcaatttaactcctttataaagaacttacattacagaataaagattttttaaaaatatatttttttgtagagacagggtcttagcccagccgaggctggtctctaagtcctggcccaagcgatcctcctgcctgggcctcctaaagtgctggaattatagacatgagccatcacatccaatatacagaataaagatttttaatggaggatttaatgttcttcagaaaattttcttgaggtcagacaatgtcaaatgtctcctcagtttacactgagattttgaaaacaagtctgagctataggtccttgtgaagggtccattggaaatacttgttcaaagtaaaatggaaagcaaaggtaaaatcagcagttgaaattcagagaaagacagaaaaggagaaaagatgaaattcaacaggacagaagggaaatatattatcattaaggaggacagtatctgtagagctcattagtgatggcaaaatgacttggtcaggattatttttaacccgcttgtttctggtttgcacggctggggatgcagctagggttctgcctcagggagcacagctgtccagagcagctgtcagcctgcaagcctgaaacactccctcggtaaagtccttcctactcaggacagaaatgacgagaacagggagctggaaacaggcccctaaccagagaagggaagtaatggatcaacaaagttaactagcaggtcaggatcacgcaattcatttcactctgactggtaacatgtgacagaaacagtgtaggcttattgtattttcatgtagagtaggacccaaaaatccacccaaagtcctttatctatgccacatccttcttatctatacttccaggacactttttcttccttatgataaggctctctctctctccacacacacacacacacacacacacacacacacacacacacacacaaacacacaccccgccaaccaaggtgcatgtaaaaagatgtagattcctctgcctttctcatctacacagcccaggagggtaagttaatataagagggatttattggtaagagatgatgcttaatctgtttaacactgggcctcaaagagagaatttcttttcttctgtacttattaagcacctattatgtgttgagcttatatatacaaagggttattatatgctaatatagtaatagtaatggtggttggtactatggtaattaccataaaaattattatccttttaaaataaagctaattattattggatcttttttagtattcattttatgttttttatgtttttgattttttaaaagacaatctcaccctgttacccaggctggagtgcagtggtgcaatcatagctttctgcagtcttgaactcctgggctcaagcaatcctcctgccttggcctcccaaagtgttgggatacagtcatgagccactgcatctggcctaggatccatttagattaaaatatgcattttaaattttaaaataatatggctaatttttaccttatgtaatgtgtatactggcaataaatctagtttgctgcctaaagtttaaagtgctttccagtaagcttcatgtacgtgaggggagacatttaaagtgaaacagacagccaggtgtggtggctcacgcctgtaatcccagcactctgggaggctgaggtgggtggatcgcttgagccctggagttcaagaccagcctgagcaacatggcaaaacgctgtttctataacaaaaattagccgggcatggtggcatgtgcctgtggtcccagctactagggggctgaggcaggagaatcgttggagcccaggaggtcaaggctgcactgagcagtgcttgcgccactgcactccagcctgggtgacaggaccagaccttgcctcaaaaaaataagaagaaaaattaaaaataaatggaaacaactacaaagagctgttgtcctagatgagctacttagttaggctgatattttggtatttaacttttaaagtcagggtctgtcacctgcactacattattaaaatatcaattctcaatgtatatccacacaaagactggtacgtgaatgttcatagtacctttattcacaaaaccccaaagtagagactatccaaatatccatcaacaagtgaacaaataaacaaaatgtgctatatccatgcaatggaataccaccctgcagtacaaagaagctacttggggatgaatcccaaagtcatgacgctaaatgaaagagtcagacatgaaggaggagataatgtatgccatacgaaattctagaaaatgaaagtaacttatagttacagaaagcaaatcagggcaggcatagaggctcacacctgtaatcccagcactttgagaggccacgtgggaagattgctagaactcaggagttcaagaccagcctgggcaacacagtgaaactccattctccacaaaaatgggaaaaaaagaaagcaaatcagtggttgtcctgtggggaggggaaggactgcaaagagggaagaagctctggtggggtgagggtggtgattcaggttctgtatcctgactgtggtagcagtttggggtgtttacatccaaaaatattcgtagaattatgcatcttaaatgggtggagtttactgtatgtaaattatacctcaatgtaagaaaaaataatgtgtaagaaaactttcaattctcttgccagcaaacgttattcaaattcctgagccctttacttcgcaaattctctgcacttctgccccgtaccattaggtgacagcactagctccacaaattggataaatgcatttctggaaaagactagggacaaaatccaggcatcacttgtgctttcatatcaaccatgctgtacagcttgtgttgctgtctgcagctgcaatggggactcttgatttctttaaggaaacttgggttaccagagtatttccacaaatgctattcaaattagtgcttatgatatgcaagacactgtgctaggagccagaaaacaaagaggaggagaaatcagtcattatgtgggaacaacatagcaagatatttagatcattttgactagttaaaaaagcagcagagtacaaaatcacacatgcaatcagtataatccaaatcatgtaaatatgtgcctgtagaaagactagaggaataaacacaagaatcttaacagtcattgtcattagacactaagtctaattattattattagacactatgatatttgagatttaaaaaatctttaatattttaaaatttagagctcttctatttttccatagtattcaagtttgacaatgatcaagtattactctttctttttttttttttttttttttttttgagatggagttttggtcttgttgcccatgctggagtggaatggcatgaccatagctcactgcaacctccacctcctgggttcaagcaaagctgtcgcctcagcctcccgggtagatgggattacaggcgcccaccaccacactcggctaatgtttgtatttttagtagagatggggtttcaccatgttggccaggctggtctcaaactcctgacctcagaggatccacctgcctcagcctcccaaagtgctgggattacagatgtaggccactgcgcccggccaagtattgctcttatacattaaaaaacaggtgtgagccactgcgcccagccaggtattgctcttatacattaaaaaataggccggtgcagtggctcacgcctgtaatcccagcactttgggaagccaaggcgggcagaacacccgaggtcaggagtccaaggccagcctggccaagatggtgaaaccccgtctctattaaaaatacaaacattacctgggcatgatggtgggcgcctgtaatcccagctactcaggaggctgaggcaggaggatccgcggagcctggcagatctgcctgagcctgggaggttgaggctacagtaagccaagatcatgccagtatacttcagcctgggcgacaaagtgagaccgtaacaaaaaaaaaaaaatttaaaaaaagaaatttagatcaagatccaactgtaaaaagtggcctaaacaccacattaaagagtttggagtttattctgcaggcagaagagaaccatcagggggtcttcagcatgggaatggcatggtgcacctggtttttgtgagatcatggtggtgacagtgtggggaatgttattttggagggactggaggcagacagaccggttaaaaggccagcacaacagataaggaggaagaagatgagggcttggaccgaagcagagaagagcaaacagggaaggtacaaattcaagaaatattggggggtttgaatcaacacatttagatgattaattaaatatgaggactgaggaataagaaatgagtcaaggatggttccaggctgctaggctgcttacctgaggtggcaaagtcgggaggagtggcagtttaggacagggggcagttgaggaatattgttttgatcattttgagtttgaggtacaagttggacacttaggtaaagactggaggggaaatctgaatatacaattatgggactgaggaacaagtttattttattttttgtttcgttttcttgttgaagaacaaatttaattgtaatcccaagtcatcagcatctagaagacagtggcaggaggtgactgtcttgtgggtaagggtttggggtccttgatgagtatctctcaattggccttaaatataagcaggaaaaggagtttatgatggattccaggctcagcagggctcaggagggctcaggcagccagcagaggaagtcagagcatcttctttggtttagcccaagtaatgacttccttaaaaagctgaaggaaaatccagagtgaccagattataaactgtactcttgcattttctctccctcctctcacccacagcctcttgatgaaccggaggaagtttctttaccaattcaaaaatgtccgctgggctaagggtcggcgtgagacctacctgtgctacgtagtgaagaggcgtgacagtgctacatccttttcactggactttggttatcttcgcaataaggtatcaattaaagtcggctttgcaagcagtttaatggtcaactgtgagtgcttttagagccacctgctgatggtattacttccatccttttttggcatttgtgtctctatcacattcctcaaatccttttttttatttctttttccatgtccatgcacccatattagacatggcccaaaatatgtgatttaattcctccccagtaatgctgggcaccctaataccactccttccttcagtgccaagaacaactgctcccaaactgtttaccagctttcctcagcatctgaattgcctttgagattaattaagctaaaagcatttttatatgggagaatattatcagcttgtccaagcaaaaattttaaatgtgaaaaacaaattgtgtcttaagcatttttgaaaattaaggaagaagaatttgggaaaaaattaacggtggctcaattctgtcttccaaatgatttcttttccctcctactcacatgggtcgtaggccagtgaatacattcaacatggtgatccccagaaaactcagagaagcctcggctgatgattaattaaattgatctttcggctacccgagagaattacatttccaagagacttcttcaccaaaatccagatgggtttacataaacttctgcccacgggtatctcctctctcctaacacgctgtgacgtctgggcttggtggaatctcagggaagcatccgtggggtggaaggtcatcgtctggctcgttgtttgatggttatattaccatgcaattttctttgcctacatttgtattgaatacatcccaatctccttcctattcggtgacatgacacattctatttcagaaggctttgattttatcaagcactttcatttacttctcatggcagtgcctattacttctcttacaatacccatctgtctgctttaccaaaatctatttccccttttcagatcctcccaaatggtcctcataaactgtcctgcctccacctagtggtccaggtatatttccacaatgttacatcaacaggcacttctagccattttccttctcaaaaggtgcaaaaagcaacttcataaacacaaattaaatcttcggtgaggtagtgtgatgctgcttcctcccaactcagcgcacttcgtcttcctcattccacaaaaacccatagccttccttcactctgcaggactagtgctgccaagggttcagctctacctactggtgtgctcttttgagcaagttgcttagcctctctgtaacacaaggacaatagctgcaagcatccccaaagatcattgcaggagacaatgactaaggctaccagagccgcaataaaagtcagtgaattttagcgtggtcctctctgtctctccagaacggctgccacgtggaattgctcttcctccgctacatctcggactgggacctagaccctggccgctgctaccgcgtcacctggttcacctcctggagcccctgctacgactgtgcccgacatgtggccgactttctgcgagggaaccccaacctcagtctgaggatcttcaccgcgcgcctctacttctgtgaggaccgcaaggctgagcccgaggggctgcggcggctgcaccgcgccggggtgcaaatagccatcatgaccttcaaaggtgcgaaagggccttccgcgcaggcgcagtgcagcagcccgcattcgggattgcgatgcggaatgaatgagttagtggggaagctcgaggggaagaagtgggcggggattctggttcacctctggagccgaaattaaagattagaagcagagaaaagagtgaatggctcagagacaaggccccgaggaaatgagaaaatggggccagggttgcttctttcccctcgatttggaacctgaactgtcttctacccccatatccccgcctttttttcctttttttttttttgaagattatttttactgctggaatacttttgtagaaaaccacgaaagaactttcaaagcctgggaagggctgcatgaaaattcagttcgtctctccagacagcttcggcgcatccttttggtaaggggcttcctcgctttttaaattttctttctttctctacagtcttttttggagtttcgtatatttcttatattttcttattgttcaatcactctcagttttcatctgatgaaaactttatttctcctccacatcagctttttcttctgctgtttcaccattcagagccctctgctaaggttccttttccctcccttttctttcttttgttgtttcacatctttaaatttctgtctctccccagggttgcgtttccttcctggtcagaattcttttctcctttttttttttttttttttttttttttaaacaaacaaacaaaaaacccaaaaaaactctttcccaatttactttcttccaacatgttacaaagccatccactcagtttagaagactctccggccccaccgacccccaacctcgttttgaagccattcactcaatttgcttctctctttctctacagcccctgtatgaggttgatgacttacgagacgcatttcgtactttgggactttgatagcaacttccaggaatgtcacacacgatgaaatatctctgctgaagacagtggataaaaaacagtccttcaagtcttctctgtttttattcttcaactctcactttcttagagtttacagaaaaaatatttatatacgactctttaaaaagatctatgtcttgaaaatagagaaggaacacaggtctggccagggacgtgctgcaattggtgcagttttgaatgcaacattgtcccctactgggaataacagaactgcaggacctgggagcatcctaaagtgtcaacgtttttctatgacttttaggtaggatgagagcagaaggtagatcctaaaaagcatggtgagaggatcaaatgtttttatatcaacatcctttattatttgattcatttgagttaacagtggtgttagtgatagatttttctattcttttcccttgacgtttactttcaagtaacacaaactcttccatcaggccatgatctataggacctcctaatgagagtatctgggtgattgtgaccccaaaccatctctccaaagcattaatatccaatcatgcgctgtatgttttaatcagcagaagcatgtttttatgtttgtacaaaagaagattgttatgggtggggatggaggtatagaccatgcatggtcaccttcaagctactttaataaaggatcttaaaatgggcaggaggactgtgaacaagacaccctaataatgggttgatgtctgaagtagcaaatcttctggaaacgcaaactcttttaaggaagtccctaatttagaaacacccacaaacttcacatatcataattagcaaacaattggaaggaagttgcttgaatgttggggagaggaaaatctattggctctcgtgggtctcttcatctcagaaatgccaatcaggtcaaggtttgctacattttgtatgtgtgtgatgcttctcccaaaggtatattaactatataagagagttgtgacaaaacagaatgataaagctgcgaaccgtggcacacgctcatagttctagctgcttgggaggttgaggagggaggatggcttgaacacaggtgttcaaggccagcctgggcaacataacaagatcctgtctctcaaaaaaaaaaaaaaaaaaaagaaagagagagggccgggcgtggtggctcacgcctgtaatcccagcactttgggaggccgagccgggcggatcacctgtggtcaggagtttgagaccagcctggccaacatggcaaaaccccgtctgtactcaaaatgcaaaaattagccaggcgtggtagcaggcacctgtaatcccagctacttgggaggctgaggcaggagaatcgcttgaacccaggaggtggaggttgcagtaagctgagatcgtgccgttgcactccagcctgggcgacaagagcaagactctgtctcagaaaaaaaaaaaaaaaagagagagagagagaaagagaacaatatttgggagagaaggatggggaagcattgcaaggaaattgtgctttatccaacaaaatgtaaggagccaataagggatccctatttgtctcttttggtgtctatttgtccctaacaactgtctttgacagtgagaaaaatattcagaataaccatatccctgtgccgttattacctagcaacccttgcaatgaagatgagcagatccacaggaaaacttgaatgcacaactgtcttattttaatcttattgtacataagtttgtaaaagagttaaaaattgttacttcatgtattcatttatattttatattattttgcgtctaatgattttttattaacatgatttccttttctgatatattgaaatggagtctcaaagcttcataaatttataactttagaaatgattctaataacaacgtatgtaattgtaacattgcagtaatggtgctacgaagccatttctcttgatttttagtaaacttttatgacagcaaatttgcttctggctcactttcaatcagttaaataaatgataaataattttggaagctgtgaagataaaataccaaataaaataatataaaagtgatttatatgaagttaaaataaaaaatcagtatgatggaataaacttg

SEQ ID NO: 16 - protein, 198 aa, Homo sapiens [sequence omitted]

SEQ ID NO: 17 - protein, 198 aa, Canis lupus
  REGION 1..198: note = MISC_FEATURE - Canine AID (clAID) polypeptide sequence
  REGION 1..30: note = MISC_FEATURE - Nuclear localization sequence
  REGION 183..198: note = MISC_FEATURE - Nuclear export signal
MDSLLMKQRKFLYHFKNVRWAKGRHETYLCYVVKRRDSATSFSLDFGHLRNKSGCHVELLFLRYISDWDLDPGRCYRVTWFTSWSPCYDCARHVADFLRGYPNLSLRIFAARLYFCEDRKAEPEGLRRLHRAGVQIAIMTFKDYFYCWNTFVENREKTFKAWEGLHENSVRLSRQLRRILLPLYEVDDLRDAFRTLGL

SEQ ID NO: 18 - protein, 199 aa, Bos taurus
  REGION 1..199: note = MISC_FEATURE - Bovine AID (btAID) polypeptide sequence
  REGION 1..30: note = MISC_FEATURE - Nuclear localization sequence
  REGION 183..199: note = MISC_FEATURE - Nuclear export signal
MDSLLKKQRQFLYQFKNVRWAKGRHETYLCYVVKRRDSPTSFSLDFGHLRNKAGCHVELLFLRYISDWDLDPGRCYRVTWFTSWSPCYDCARHVADFLRGYPNLSLRIFTARLYFCDKERKAEPEGLRRLHRAGVQIAIMTFKDYFYCWNTFVENHERTFKAWEGLHENSVRLSRQLRRILLPLYEVDDLRDAFRTLGL

SEQ ID NO: 19 - protein, 239 aa, Rattus sp.
  REGION 1..239: note = MISC_FEATURE - Rat AID polypeptide sequence
  REGION 1..26: note = MISC_FEATURE - Nuclear localization sequence
  REGION 194..239: note = MISC_FEATURE - Nuclear export signal
MAVGSKPKAALVGPHWERERIWCFLCSTGLGTQQTGQTSRWLRPAATQDPVSPPRSLLMKQRKFLYHFKNVRWAKGRHETYLCYVVKRRDSATSFSLDFGYLRNKSGCHVELLFLRYISDWDLDPGRCYRVTWFTSWSPCYDCARHVADFLRGNPNLSLRIFTARLTGWGALPAGLMSPARPSDYFYCWNTFVENHERTFKAWEGLHENSVRLSRRLRRILLPLYEVDDLRDAFRTLGL

SEQ ID NO: 20 - protein, 198 aa, Mus musculus [sequence omitted]

SEQ ID NO: 21 - protein, 229 aa, Rattus norvegicus [sequence omitted]

SEQ ID NO: 22 - protein, 229 aa, Mesocricetus auratus
  REGION 1..229: note = MISC_FEATURE - maAPOBEC-1 polypeptide sequence
MSSETGPVVVDPTLRRRIEPHEFDAFFDQGELRKETCLLYEIRWGGRHNIWRHTGQNTSRHVEINFIEKFTSERYFYPSTRCSIVWFLSWSPCGECSKAITEFLSGHPNVTLFIYAARLYHHTDQRNRQGLRDLISRGVTIRIMTEQEYCYCWRNFVNYPPSNEVYWPRYPNLWMRLYALELYCIHLGLPPCLKIKRRHQYPLTFFRLNLQSCHYQRIPPHILWATGFI

SEQ ID NO: 23 - protein, 236 aa, Pongo pygmaeus
  REGION 1..236: note = MISC_FEATURE - ppAPOBEC-1 polypeptide sequence
MTSEKGPSTGDPTLRRRIESWEFDVFYDPRELRKETCLLYEIKWGMSRKIWRSSGKNTTNHVEVNFIKKFTSERRFHSSISCSITWFLSWSPCWECSQAIREFLSQHPGVTLVIYVARLFWHMDQRNRQGLRDLVNSGVTIQIMRASEYYHCWRNFVNYPPGDEAHWPQYPPLWMMLYALELHCIILSLPPCLKISRRWQNHLAFFRLHLQNCHYQTIPPHILLATGLIHPSVTWR

SEQ ID NO: 24 - protein, 236 aa, Oryctolagus cuniculus
  REGION 1..236: note = MISC_FEATURE - ocAPOBEC1 polypeptide sequence
MASEKGPSNKDYTLRRRIEPWEFEVFFDPQELRKEACLLYEIKWGASSKTWRSSGKNTTNHVEVNFLEKLTSEGRLGPSTCCSITWFLSWSPCWECSMAIREFLSQHPGVTLIIFVARLFQHMDRRNRQGLKDLVTSGVTVRVMSVSEYCYCWENFVNYPPGKAAQWPRYPPRWMLMYALELYCIILGLPPCLKISRRHQKQLTFFSLTPQYCHYKMIPPYILLATGLLQPSVPWR

SEQ ID NO: 25 - protein, 235 aa, Monodelphis domestica
  REGION 1..235: note = MISC_FEATURE - mdAPOBEC-1 polypeptide sequence
MNSKTGPSVGDATLRRRIKPWEFVAFFNPQELRKETCLLYEIKWGNQNIWRHSNQNTSQHAEINFMEKFTAERHFNSSVRCSITWFLSWSPCWECSKAIRKFLDHYPNVTLAIFISRLYWHMDQQHRQGLKELVHSGVTIQIMSYSEYHYCWRNFVDYPQGEEDYWPKYPYLWIMLYVLELHCIILGLPPCLKISGSHSNQLALFSLDLQDCHYQKIPYNVLVATGLVQPFVTWR

SEQ ID NO: 26 - protein, 224 aa, Pongo pygmaeus
  REGION 1..224: note = MISC_FEATURE - ppAPOBEC-2 polypeptide sequence
MAQKEEAAAATEAASQNGEDLENLDDPEKLKELIELPPFEIVTGERLPANFFKFQFRNVEYSSGRNKTFLCYVVEAQGKGGQVQASRGYLEDEHAAAHAEEAFFNTILPAFDPALRYNVTWYVSSSPCAACADRIIKTLSKTKNLRLLILVGRLFMWEELEIQDALKKLKEAGCKLRIMKPQDFEYVWQNFVEQEEGESKAFQPWEDIQENFLYYEEKLADILK

SEQ ID NO: 27 - protein, 224 aa, Bos taurus
  REGION 1..224: note = MISC_FEATURE - btAPOBEC-2 polypeptide sequence
MAQKEEAAAAAEPASQNGEEVENLEDPEKLKELIELPPFEIVTGERLPAHYFKFQFRNVEYSSGRNKTFLCYVVEAQSKGGQVQASRGYLEDEHATNHAEEAFFNSIMPTFDPALRYMVTWYVSSSPCAACADRIVKTLNKTKNLRLLILVGRLFMWEEPEIQAALRKLKEAGCRLRIMKPQDFEYIWQNFVEQEEGESKAFEPWEDIQENFLYYEEKLADILK

SEQ ID NO: 28 - protein, 440 aa, Mus musculus
  REGION 1..440: note = MISC_FEATURE - mAPOBEC-3-(1) polypeptide sequence
MQPQRLGPRAGMGPFCLGCSHRKCYSPIRNLISQETFKFHFKNLGYAKGRKDTFLCYEVTRKDCDSPVSLHHGVFKNKDNIHAEICFLYWFHDKVLKVLSPREEFKITWYMSWSPCFECAEQIVRFLATHHNLSLDIFSSRLYNVQDPETQQNLCRLVQEGAQVAAMDLYEFKKCWKKFVDNGGRRFRPWKRLLTNFRYQDSKLQEILRPCYISVPSSSSSTLSNICLTKGLPETRFWVEGRRMDPLSEEEFYSQFYNQRVKHLCYYHRMKPYLCYQLEQFNGQAPLKGCLLSEKGKQHAEILFLDKIRSMELSQVTITCYLTWSPCPNCAWQLAAFKRDRPDLILHIYTSRLYFHWKRPFQKGLCSLWQSGILVDVMDLPQFTDCWTNFVNPKRPFWPWKGLEIISRRTQRRLRRIKESWGLQDLVNDFGNLQLGPPMS

SEQ ID NO: 29 - protein, 429 aa, Mus musculus
  REGION 1..429: note = MISC_FEATURE - APOBEC-3-(2) (Mouse APOBEC-3) polypeptide sequence
  REGION 71..108: note = MISC_FEATURE - Nucleic acid editing domain
  REGION 288..319: note = MISC_FEATURE - Nucleic acid editing domain
MGPFCLGCSHRKCYSPIRNLISQETFKFHFKNLGYAKGRKDTFLCYEVTRKDCDSPVSLHHGVFKNKDNIHAEICFLYWFHDKVLKVLSPREEFKITWYMSWSPCFECAEQIVRFLATHHNLSLDIFSSRLYNVQDPETQQNLCRLVQEGAQVAAMDLYEFKKCWKKFVDNGGRRFRPWKRLLTNFRYQDSKLQEILRPCYIPVPSSSSSTLSNICLTKGLPETRFCVEGRRMDPLSEEEFYSQFYNQRVKHLCYYHRMKPYLCYQLEQFNGQAPLKGCLLSEKGKQHAEILFLDKIRSMELSQVTITCYLTWSPCPNCAWQLAAFKRDRPDLILHIYTSRLYFHWKRPFQKGLCSLWQSGILVDVMDLPQFTDCWTNFVNPKRPFWPWKGLEIISRRTQRRLRRIKESWGLQDLVNDFGNLQLGPPMS

SEQ ID NO: 30 - protein, 430 aa, Rattus sp.
  REGION 1..430: note = MISC_FEATURE - APOBEC-3 polypeptide sequence
  REGION 72..109: note = MISC_FEATURE - Nucleic acid editing domain
  REGION 289..320: note = MISC_FEATURE - Nucleic acid editing domain
MGPFCLGCSHRKCYSPIRNLISQETFKFHFKNRLRYAIDRKDTFLCYEVTRKDCDSPVSLHHGVFKNKDNIHAEICFLYWFHDKVLKVLSPREEFKITWYMSWSPCFECAEQVLRFLATHHNLSLDIFSSRLYNIRDPENQQNLCRLVQEGAQVAAMDLYEFKKCWKKFVDNGGRRFRPWKKLLTNFRYQDSKLQEILRPCYIPVPSSSSSTLSNICLTKGLPETRFCVERRRVHLLSEEEFYSQFYNQRVKHLCYYHGVKPYLCYQLEQFNGQAPLKGCLLSEKGKQHAEILFLDKIRSMELSQVIITCYLTWSPCPNCAWQLAAFKRDRPDLILHIYTSRLYFHWKRPFQKGLCSLWQSGILVDVMDLPQFTDCWTNFVNPKRPFWPWKGLEIISRRTQRRLHRIKESWGLQDLVNDFGNLQLGPPMS

SEQ ID NO: 31 - protein, 199 aa, Homo sapiens
  REGION 1..199: note = MISC_FEATURE - hAPOBEC-3A polypeptide sequence
  REGION 70..106: note = MISC_FEATURE - Nucleic acid editing domain
MEASPASGPRHLMDPHIFTSNFNNGIGRHKTYLCYEVERLDNGTSVKMDQHRGFLHNQAKNLLCGFYGRHAELRFLDLVPSLQLDPAQIYRVTWFISWSPCFSWGCAGEVRAFLQENTHVRLRIFAARIYDYDPLYKEALQMLRDAGAQVSIMTYDEFKHCWDTFVDHQGCPFQPWDGLDEHSQALSGRLRAILQNQGN

SEQ ID NO: 32 - protein, 373 aa, Homo sapiens
  REGION 1..373: note = MISC_FEATURE - hAPOBEC-3F polypeptide sequence
  REGION 65..99: note = MISC_FEATURE - Nucleic acid editing domain
  REGION 248..283: note = MISC_FEATURE - Nucleic acid editing domain
MKPHFRNTVERMYRDTFSYNFYNRPILSRRNTVWLCYEVKTKGPSRPRLDAKIFRGQVYSQPEHHAEMCFLSWFCGNQLPAYKCFQITWFVSWTPCPDCVAKLAEFLAEHPNVTLTISAARLYYYWERDYRRALCRLSQAGARVKIMDDEEFAYCWENFVYSEGQPFMPWYKFDDNYAFLHRTLKEILRNPMEAMYPHIFYFHFKNLRKAYGRNESWLCFTMEVVKHHSPVSWKRGVFRNQVDPETHCHAERCFLSWFCDDILSPNTNYEVTWYTSWSPCPECAGEVAEFLARHSNVNLTIFTARLYYFWDTDYQEGLRSLSQEGASVEIMGYKDFKYCWENFVYNDDEPFKPWKGLKYNFLFLDSKLQEILE

SEQ ID NO: 33 - protein, 370 aa, Macaca mulatta
  REGION 1..370: note = MISC_FEATURE - Rhesus macaque APOBEC-3G polypeptide sequence
  REGION 1..61: note = MISC_FEATURE - Cytoplasmic localization signal
MVEPMDPRTFVSNFNNRPILSGLNTVWLCCEVKTKDPSGPPLDAKIFQGKVYSKAKYHPEMRFLRWFHKWRQLHHDQEYKVTWYVSWSPCTRCANSVATFLAKDPKVTLTIFVARLYYFWKPDYQQALRILCQKRGGPHATMKIMNYNEFQDCWNKFVDGRGKPFKPRNNLPKHYTLLQATLGELLRHLMDPGTFTSNFNNKPWVSGQHETYLCYKVERLHNDTWVPLNQHRGFLRNQAPNIHGFPKGRHAELCFLDLIPFWKLDGQQYRVTCFTSWSPCFSCAQEMAKFISNNEHVSLCIFAARIYDDQGRYQEGLRALHRDGAKIAMMNYSEFEYCWDTFVDRQGRPFQPWDGLDEHSQALSGRLRAI

SEQ ID NO: 34 - protein, 384 aa, Pan troglodytes
  REGION 1..384: note = MISC_FEATURE - Chimpanzee APOBEC-3G polypeptide sequence
  REGION 1..60: note = MISC_FEATURE - Cytoplasmic localization signal
  REGION 65..100: note = MISC_FEATURE - Nucleic acid editing domain
  REGION 257..291: note = MISC_FEATURE - Nucleic acid editing domain
MKPHFRNPVERMYQDTFSDNFYNRPILSHRNTVWLCYEVKTKGPSRPPLDAKIFRGQVYSKLKYHPEMRFFHWFSKWRKLHRDQEYEVTWYISWSPCTKCTRDVATFLAEDPKVTLTIFVARLYYFWDPDYQEALRSLCQKRDGPRATMKIMNYDEFQHCWSKFVYSQRELFEPWNNLPKYYILLHIMLGEILRHSMDPPTFTSNFNNELWVRGRHETYLCYEVERLHNDTWVLLNQRRGFLCNQAPHKHGFLEGRHAELCFLDVIPFWKLDLHQDYRVTCFTSWSPCFSCAQEMAKFISNNKHVSLCIFAARIYDDQGRCQEGLRTLAKAGAKISIMTYSEFKHCWDTFVDHQGCPFQPWDGLEEHSQALSGRLRAILQNQGN

SEQ ID NO: 35 - protein, 377 aa, Chlorocebus sabaeus
  REGION 1..377: note = MISC_FEATURE - Green monkey APOBEC-3G polypeptide sequence
  REGION 1..60: note = MISC_FEATURE - Cytoplasmic localization signal
  REGION 65..100: note = MISC_FEATURE - Nucleic acid editing domain
  REGION 257..290: note = MISC_FEATURE - Nucleic acid editing domain
MNPQIRNMVEQMEPDIFVYYFNNRPILSGRNTVWLCYEVKTKDPSGPPLDANIFQGKLYPEAKDHPEMKFLHWFRKWRQLHRDQEYEVTWYVSWSPCTRCANSVATFLAEDPKVTLTIFVARLYYFWKPDYQQALRILCQERGGPHATMKIMNYNEFQHCWNEFVDGQGKPFKPRKNLPKHYTLLHATLGELLRHVMDPGTFTSNFNNKPWVSGQRETYLCYKVERSHNDTWVLLNQHRGFLRNQAPDRHGFPKGRHAELCFLDLIPFWKLDDQQYRVTCFTSWSPCFSCAQKMAKFISNNKHVSLCIFAARIYDDQGRCQEGLRTLHRDGAKIAVMNYSEFEYCWDTFVDRQGRPFQPWDGLDEHSQALSGRLRAI

SEQ ID NO: 36 - protein, 384 aa, Homo sapiens
  REGION 1..384: note = MISC_FEATURE - Human APOBEC-3G polypeptide sequence
  REGION 1..60: note = MISC_FEATURE - Cytoplasmic localization signal
  REGION 65..100: note = MISC_FEATURE - Nucleic acid editing domain
  REGION 257..291: note = MISC_FEATURE - Nucleic acid editing domain
MKPHFRNTVERMYRDTFSYNFYNRPILSRRNTVWLCYEVKTKGPSRPPLDAKIFRGQVYSELKYHPEMRFFHWFSKWRKLHRDQEYEVTWYISWSPCTKCTRDMATFLAEDPKVTLTIFVARLYYFWDPDYQEALRSLCQKRDGPRATMKIMNYDEFQHCWSKFVYSQRELFEPWNNLPKYYILLHIMLGEILRHSMDPPTFTFNFNNEPWVRGRHETYLCYEVERMHNDTWVLLNQRRGFLCNQAPHKHGFLEGRHAELCFLDVIPFWKLDLDQDYRVTCFTSWSPCFSCAQEMAKFISKNKHVSLCIFTARIYDDQGRCQEGLRTLAEAGAKISIMTYSEFKHCWDTFVDHQGCPFQPWDGLDEHSQDLSGRLRAILQNQEN

SEQ ID NO: 37 - protein, 382 aa, Homo sapiens
  REGION 1..382: note = MISC_FEATURE - Human APOBEC-3B polypeptide sequence
  REGION 66..100: note = MISC_FEATURE - Nucleic acid editing domain
  REGION 251..289: note = MISC_FEATURE - Nucleic acid editing domain
MNPQIRNPMERMYRDTFYDNFENEPILYGRSYTWLCYEVKIKRGRSNLLWDTGVFRGQVYFKPQYHAEMCFLSWFCGNQLPAYKCFQITWFVSWTPCPDCVAKLAEFLSEHPNVTLTISAARLYYYWERDYRRALCRLSQAGARVTIMDYEEFAYCWENFVYNEGQQFMPWYKFDENYAFLHRTLKEILRYLMDPDTFTFNFNNDPLVLRRRQTYLCYEVERLDNGTWVLMDQHMGFLCNEAKNLLCGFYGRHAELRFLDLVPSLQLDPAQIYRVTWFISWSPCFSWGCAGEVRAFLQENTHVRLRIFAARIYDYDPLYKEALQMLRDAGAQVSIMTYDEFEYCWDTFVYRQGCPFQPWDGLEEHSQALSGRLRAILQNQGN

SEQ ID NO: 38 - protein, 395 aa, Rattus sp.
  REGION 1..395: note = MISC_FEATURE - Rat APOBEC-3B polypeptide sequence
MQPQGLGPNAGMGPVCLGCSHRRPYSPIRNPLKKLYQQTFYFHFKNVRYAWGRKNNFLCYEVNGMDCALPVPLRQGVFRKQGHIHAELCFIYWFHDKVLRVLSPMEEFKVTWYMSWSPCSKCAEQVARFLAAHRNLSLAIFSSRLYYYLRNPNYQQKLCRLIQEGVHVAAMDLPEFKKCWNKFVDNDGQPFRPWMRLRINFSFYDCKLQEIFSRMNLLREDVFYLQFNNSHRVKPVQNRYYRRKSYLCYQLERANGQEPLKGYLLYKKGEQHVEILFLEKMRSMELSQVRITCYLTWSPCPNCARQLAAFKKDHPDLILRIYTSRLYFWRKKFQKGLCTLWRSGIHVDVMDLPQFADCWTNFVNPQRPFRPWNELEKNSWRIQRRLRRIKESWGL

SEQ ID NO: 39 - protein, 226 aa, Bos taurus
  REGION 1..226: note = MISC_FEATURE - Bovine APOBEC-3B polypeptide sequence
DGWEVAFRSGTVLKAGVLGVSMTEGWAGSGHPGQGACVWTPGTRNTMNLLREVLFKQQFGNQPRVPAPYYRRKTYLCYQLKQRNDLTLDRGCFRNKKQRHAERFIDKINSLDLNPSQSYKIICYITWSPCPNCANELVNFITRNNHLKLEIFASRLYFHWIKSFKMGLQDLQNAGISVAVMTHTEFEDCWEQFVDNQSRPFQPWDKLEQYSASIRRRLQRILTAPI

SEQ ID NO: 40 - protein, 490 aa, Pan troglodytes
  REGION 1..490: note = MISC_FEATURE - Chimpanzee APOBEC-3B polypeptide sequence
MNPQIRNPMEWMYQRTFYYNFENEPILYGRSYTWLCYEVKIRRGHSNLLWDTGVFRGQMYSQPEHHAEMCFLSWFCGNQLSAYKCFQITWFVSWTPCPDCVAKLAKFLAEHPNVTLTISAARLYYYWERDYRRALCRLSQAGARVKIMDDEEFAYCWENFVYNEGQPFMPWYKFDDNYAFLHRTLKEIIRHLMDPDTFTFNFNNDPLVLRRHQTYLCYEVERLDNGTWVLMDQHMGFLCNEAKNLLCGFYGRHAELRFLDLVPSLQLDPAQIYRVTWFISWSPCFSWGCAGQVRAFLQENTHVRLRIFAARIYDYDPLYKEALQMLRDAGAQVSIMTYDEFEYCWDTFVYRQGCPFQPWDGLEEHSQALSGRLRAILQVRASSLCMVPHRPPPPPQSPGPCLPLCSEPPLGSLLPTGRPAPSLPFLLTASFSFPPPASLPPLPSLSLSPGHLPVPSFHSLTSCSIQPPCSSRIRETEGWASVSKEGRDLG

SEQ ID NO: 41 - protein, 190 aa, Homo sapiens
  REGION 1..190: note = MISC_FEATURE - Human APOBEC-3C polypeptide sequence
  REGION 65..100: note = MISC_FEATURE - Nucleic acid editing domain
MNPQIRNPMKAMYPGTFYFQFKNLWEANDRNETWLCFTVEGIKRRSVVSWKTGVFRNQVDSETHCHAERCFLSWFCDDILSPNTKYQVTWYTSWSPCPDCAGEVAEFLARHSNVNLTIFTARLYYFQYPCYQEGLRSLSQEGVAVEIMDYEDFKYCWENFVYNDNEPFKPWKGLKTNFRLLKRRLRESLQ

SEQ ID NO: 42 - protein, 190 aa, Gorilla sp.
  REGION 1..190: note = MISC_FEATURE - Gorilla APOBEC-3C polypeptide sequence
  REGION 65..100: note = MISC_FEATURE - Nucleic acid editing domain
MNPQIRNPMKAMYPGTFYFQFKNLWEANDRNETWLCFTVEGIKRRSVVSWKTGVFRNQVDSETHCHAERCFLSWECDDILSPNTNYQVTWYTSWSPCPECAGEVAEFLARHSNVNLTIFTARLYYFQDTDYQEGLRSLSQEGVAVKIMDYKDFKYCWENFVYNDDEPFKPWKGLKYNFRFLKRRLQEILE

SEQ ID NO: 43 - protein, 202 aa, Macaca mulatta
  REGION 1..202: note = MISC_FEATURE - Rhesus macaque APOBEC-3A polypeptide sequence
  REGION 72..103: note = MISC_FEATURE - Nucleic acid editing domain
MDGSPASRPRHLMDPNTFTFNFNNDLSVRGRHQTYLCYEVERLDNGTWVPMDERRGFLCNKAKNVPCGDYGCHVELRFLCEVPSWQLDPAQTYRVTWFISWSPCFRRGCAGQVRVFLQENKHVRLRIFAARIYDYDPLYQEALRTLRDAGAQVSIMTYEEFKHCWDTFVDRQGRPFQPWDGLDEHSQALSGRLRAILQNQGN

SEQ ID NO: 44 - protein, 185 aa, Bos taurus
  REGION 1..185: note = MISC_FEATURE - Bovine APOBEC-3A polypeptide sequence
  REGION 56..86: note = MISC_FEATURE - Nucleic acid editing domain
MDEYTFTENFNNQGWPSKTYLCYEMERLDGDATIPLDEYKGFVRNKGLDQPEKPCHAELYFLGKIHSWNLDRNQHYRLTCFISWSPCYDCAQKLTTFLKENHHISLHILASRIYTHNRFGCHQSGLCELQAAGARITIMTFEDFKHCWETFVDHKGKPFQPWEGLNVKSQALCTELQAILKTQQN

SEQ ID NO: 45 - protein, 200 aa, Homo sapiens
  REGION 1..200: note = MISC_FEATURE - Human APOBEC-3H polypeptide sequence
  REGION 54..88: note = MISC_FEATURE - Nucleic acid editing domain
MALLTAETFRLQFNNKRRLRRPYYPRKALLCYQLTPQNGSTPTRGYFENKKKCHAEICFINEIKSMGLDETQCYQVTCYLTWSPCSSCAWELVDFIKAHDHLNLGIFASRLYYHWCKPQQKGLRLLCGSQVPVEVMGFPKFADCWENFVDHEKPLSFNPYKMLEELDKNSRAIKRRLERIKIPGVRAQGRYMDILCDAEV

SEQ ID NO: 46 - protein, 210 aa, Macaca mulatta
  REGION 1..210: note = MISC_FEATURE - Rhesus macaque APOBEC-3H polypeptide sequence
MALLTAKTFSLQFNNKRRVNKPYYPRKALLCYQLTPQNGSTPTRGHLKNKKKDHAEIRFINKIKSMGLDETQCYQVTCYLTWSPCPSCAGELVDFIKAHRHLNLRIFASRLYYHWRPNYQEGLLLLCGSQVPVEVMGLPEFTDCWENFVDHKEPPSFNPSEKLEELDKNSQAIKRRLERIKSRSVDVLENGLRSLQLGPVTPSSSIRNSR

SEQ ID NO: 47 - protein, 386 aa, Homo sapiens
  REGION 1..386: note = MISC_FEATURE - Human APOBEC-3D polypeptide sequence
  REGION 78..109: note = MISC_FEATURE - Nucleic acid editing domain
  REGION 262..296: note = MISC_FEATURE - Nucleic acid editing domain
MNPQIRNPMERMYRDTFYDNFENEPILYGRSYTWLCYEVKIKRGRSNLLWDTGVFRGPVLPKRQSNHRQEVYFRFENHAEMCFLSWFCGNRLPANRRFQITWFVSWNPCLPCVVKVTKFLAEHPNVTLTISAARLYYYRDRDWRWVLLRLHKAGARVKIMDYEDFAYCWENFVCNEGQPFMPWYKFDDNYASLHRTLKEILRNPMEAMYPHIFYFHFKNLLKACGRNESWLCFTMEVTKHHSAVFRKRGVFRNQVDPETHCHAERCFLSWFCDDILSPNTNYEVTWYTSWSPCPECAGEVAEFLARHSNVNLTIFTARLCYFWDTDYQEGLCSLSQEGASVKIMGYKDFVSCWKNFVYSDDEPFKPWKGLQTNFRLLKRRLREILQ

SEQ ID NO: 48 - protein, 236 aa, Homo sapiens
  REGION 1..236: note = MISC_FEATURE - Human APOBEC-1 polypeptide sequence
MTSEKGPSTGDPTLRRRIEPWEFDVFYDPRELRKEACLLYEIKWGMSRKIWRSSGKNTTNHVEVNFIKKFTSERDFHPSMSCSITWFLSWSPCWECSQAIREFLSRHPGVTLVIYVARLFWHMDQQNRQGLRDLVNSGVTIQIMRASEYYHCWRNFVNYPPGDEAHWPQYPPLWMMLYALELHCIILSLPPCLKISRRWQNHLTFFRLHLQNCHYQTIPPHILLATGLIHPSVAWR

SEQ ID NO: 49 - protein, 229 aa, Mus musculus
  REGION 1..229: note = MISC_FEATURE - Mouse APOBEC-1 polypeptide sequence
MSSETGPVAVDPTLRRRIEPHEFEVFFDPRELRKETCLLYEINWGGRHSVWRHTSQNTSNHVEVNFLEKFTTERYFRPNTRCSITWFLSWSPCGECSRAITEFLSRHPYVTLFIYIARLYHHTDQRNRQGLRDLISSGVTIQIMTEQEYCYCWRNFVNYPPSNEAYWPRYPHLWVKLYVLELYCIILGLPPCLKILRRKQPQLTFFTITLQTCHYQRIPPHLLWATGLK

SEQ ID NO: 50 - protein, 224 aa, Homo sapiens
  REGION 1..224: note = MISC_FEATURE - Human APOBEC-2 polypeptide sequence
MAQKEEAAVATEAASQNGEDLENLDDPEKLKELIELPPFEIVTGERLPANFFKFQFRNVEYSSGRNKTFLCYVVEAQGKGGQVQASRGYLEDEHAAAHAEEAFFNTILPAFDPALRYNVTWYVSSSPCAACADRIIKTLSKTKNLRLLILVGRLFMWEEPEIQAALKKLKEAGCKLRIMKPQDFEYVWQNFVEQEEGESKAFQPWEDIQENFLYYEEKLADILK

SEQ ID NO: 51 - protein, 224 aa, Mus musculus
  REGION 1..224: note = MISC_FEATURE - Mouse APOBEC-2 polypeptide sequence
MAQKEEAAEAAAPASQNGDDLENLEDPEKLKELIDLPPFEIVTGVRLPVNFFKFQFRNVEYSSGRNKTFLCYVVEVQSKGGQAQATQGYLEDEHAGAHAEEAFFNTILPAFDPALKYNVTWYVSSSPCAACADRILKTLSKTKNLRLLILVSRLFMWEEPEVQAALKKLKEAGCKLRIMKPQDFEYIWQNFVEQEEGESKAFEPWEDIQENFLYYEEKLADILK

SEQ ID NO: 52 - protein, 224 aa, Rattus sp.
  REGION 1..224: note = MISC_FEATURE - Rat APOBEC-2 polypeptide sequence
MAQKEEAAEAAAPASQNGDDLENLEDPEKLKELIDLPPFEIVTGVRLPVNFFKFQFRNVEYSSGRNKTFLCYVVEAQSKGGQVQATQGYLEDEHAGAHAEEAFFNTILPAFDPALKYNVTWYVSSSPCAACADRILKTLSKTKNLRLLILVSRLFMWEEPEVQAALKKLKEAGCKLRIMKPQDFEYLWQNFVEQEEGESKAFEPWEDIQENFLYYEEKLADILK

SEQ ID NO: 53 - protein, 208 aa, Petromyzon marinus
  REGION 1..208: note = MISC_FEATURE - Petromyzon marinus CDA1 (pmCDAl) polypeptide sequence
MTDAEYVRIHEKLDIYTFKKQFFNNKKSVSHRCYVLFELKRRGERRACFWGYAVNKPQSGTERGIHAEIFSIRKVEEYLRDNPGQFTINWYSSWSPCADCAEKILEWYNQELRGNGHTLKIWACKLYYEKNARNQIGLWNLRDNGVGLNVMVSEHYQCCRKIFIQSSHNQLNENRWLEKTLKRAEKRRSELSFMIQVKILHTTKSPAV

SEQ ID NO: 54 - protein, 381 aa, Homo sapiens
  REGION 1..381: note = MISC_FEATURE - Human APOBEC3G D316R D317R polypeptide sequence
MKPHFRNTVERMYRDTFSYNFYNRPILSRRNTVWLCYEVKTKGPSRPPLDAKIFRGQVYSELKYHPEMRFFHWFSKWRKLHRDQEYEVTWYISWSPCTKCTRDMATFLAEDPKVTLTIFVARLYYFWDPDYQEALRSLCQKRDGPRATMKFNYDEFQHCWSKFVYSQRELFEPWNNLPKYYILLHFMLGEILRHSMDPPTFTFNFNNEPWVRGRHETYLCYEVERMHNDTWVLLNQRRGFLCNQAPHKHGFLEGRHAELCFLDVIPFWKLDLDQDYRVTCFTSWSPCFSCAQEMAKFISKKHVSLCIFTARIYRRQGRCQEGLRTLAEAGAKISFTYSEFKHCWDTFVDHQGCPFQPWDGLDEHSQDLSGRLRAILQNQEN

SEQ ID NO: 55 - protein, 182 aa, Homo sapiens
  REGION 1..182: note = MISC_FEATURE - Human APOBEC3G chain A polypeptide sequence
MDPPTFTFNFNNEPWWGRHETYLCYEVERMHNDTWVLLNQRRGFLCNQAPHKHGFLEGRHAELCFLDVIPFWKLDLDQDYRVTCFTSWSPCFSCAQEMAKFISKNKHVSLCIFTARIYDDQGRCQEGLRTLAEAGAKISFTYSEFKHCWDTFVDHQGCPFQPWDGLDEHSQDLSGRLRAILQ

SEQ ID NO: 56 - protein, 184 aa, Homo sapiens
  REGION 1..184: note = MISC_FEATURE - Human APOBEC3G chain A D120R D121R polypeptide sequence
MDPPTFTFNFNNEPWVRGRHETYLCYEVERMHNDTWVLLNQRRGFLCNQAPHKHGFLEGRHAELCFLDVIPFWKLDLDQDYRVTCFTSWSPCFSCAQEMAKFISKNKHVSLCIFTARIYRRQGRCQEGLRTLAEAGAKISFMTYSEFKHCWDTFVDHQGCPFQPWDGLDEHSQDLSGRLRAILQ

SEQ ID NO: 57 - protein, 367 aa, Homo sapiens
  REGION 1..367: note = MISC_FEATURE - hAPOBEC-4 polypeptide sequence
MEPIYEEYLANHGTIVKPYYWLSFSLDCSNCPYHIRTGEEARVSLTEFCQIFGFPYGTTFPQTKHLTFYELKTSSGSLVQKGHASSCTGNYIHPESMLFEMNGYLDSAIYNNDSIRHIILYSNNSPCNEANHCCISKMYNFLITYPGITLSIYFSQLYHTEMDFPASAWNREALRSLASLWPRVVLSPISGGIWHSVLHSFISGVSGSHVFQPILTGRALADRHNAYEINAITGVKPYFTDVLLQTKRNPNTKAQEALESYPLNNAFPGQFFQMPSGQLQPNLPPDLRAPVVFVLVPLRDLPPMHMGQNPNKPRNIVRHLNMPQMSFQETKDLGRLPTGRSVEIVEITEQFASSKEADEKKKKKGKK

SEQ ID NO: 58 - protein, 388 aa, Rattus norvegicus
  REGION 1..388: note = MISC_FEATURE - rAPOBEC-4 polypeptide sequence
MEPLYEEYLTHSGTIVKPYYWLSVSLNCTNCPYHIRTGEEARVPYTEFHQTFGFPWSTYPQTKHLTFYELRSSSGNLIQKGLASNCTGSHTHPESMLFERDGYLDSLIFHDSNIRHIILYSNNSPCDEANHCCISKMYNFLMNYPEVTLSVFFSQLYHTENQFPTSAWNREALRGLASLWPQVTLSAISGGIWQSILETFVSGISEGLTAVRPFTAGRTLTDRYNAYEINCITEVKPYFTDALHSWQKENQDQKVWAASENQPLHNTTPAQWQPDMSQDCRTPAVFMLVPYRDLPPIHVNPSPQKPRTVVRHLNTLQLSASKVKALRKSPSGRPVKKEEARKGSTRSQEANETNKSKWKKQTLFIKSNICHLLEREQKKIGILSSWSV

SEQ ID NO: 59 - protein, 363 aa, Macaca fascicularis
  REGION 1..363: note = MISC_FEATURE - mfAPOBEC-4 polypeptide sequence
MEPTYEEYLANHGTIVKPYYWLSFSLDCSNCPYHIRTGEEARVSLTEFCQIFGFPYGTTYPQTKHLTFYELKTSSGSLVQKGHASSCTGNYIHPESMLFEMNGYLDSAIYNNDSIRHIILYCNNSPCNEANHCCISKVYNFLITYPGITLSIYFSQLYHTEMDFPASAWNREALRSLASLWPRVVLSPISGGIWHSVLHSFVSGVSGSHVFQPILTGRALTDRYNAYEINAITGVKPFFTDVLLHTKRNPNTKAQMALESYPLNNAFPGQSFQMTSGIPPDLRAPVVFVLLPLRDLPPMHMGQDPNKPRNIIRHLNMPQMSFQETKDLERLPTRRSVETVEITERFASSKQAEEKTKKKKGKK

SEQ ID NO: 60 - protein, 218 aa, Rattus norvegicus
  REGION 1..218: note = MISC_FEATURE - rAPOBEC-1 (delta 177-186) polypeptide sequence
MSSETGPVAVDPTLRRRIEPHEFEVFFDPRELRKETCLLYEINWGGRHSIWRHTSQNTNKHVEVNFIEKFTTERYFCPNTRCSITWFLSWSPCGECSRAITEFLSRYPHVTLFIYIARLYHHADPRNRQGLRDLISSGVTIQIMTEQESGYCWRNFVNYSPSNEAHWPRYPHLWVRGLPPCLNILRRKQPQLTFFTIALQSCHYQRLPPHILWATGLK

SEQ ID NO: 61 - protein, 218 aa, Rattus norvegicus
  REGION 1..218: note = MISC_FEATURE - rAPOBEC-1 (delta 202-213) polypeptide sequence
MSSETGPVAVDPTLRRRIEPHEFEVFFDPRELRKETCLLYEINWGGRHSIWRHTSQNTNKHVEVNFIEKFTTERYFCPNTRCSITWFLSWSPCGECSRAITEFLSRYPHVTLFIYIARLYHHADPRNRQGLRDLISSGVTIQIMTEQESGYCWRNFVNYSPSNEAHWPRYPHLWVRLYVLELYCIILGLPPCLNILRRKQPQHYQRLPPHILWATGLK

SEQ ID NO: 62 - protein, 198 aa, Mus musculus
  REGION 1..198: note = MISC_FEATURE - mouse cytidine deaminase polypeptide sequence
  REGION 1..30: note = MISC_FEATURE - Nuclear localization sequence
  REGION 183..198: note = MISC_FEATURE - Nuclear export signal
MDSLLMKQKKFLYHFKNVRWAKGRHETYLCYVVKRRDSATSCSLDFGHLRNKSGCHVELLFLRYISDWDLDPGRCYRVTWFTSWSPCYDCARHVAEFLRWNPNLSLRIFTARLYFCEDRKAEPEGLRRLHRAGVQIGIMTFKDYFYCWNTFVENRERTFKAWEGLHENSVRLTRQLRRILLPLYEVDDLRDAFRMLGF

SEQ ID NO: 63 - protein, 224 aa, Petromyzon marinus
  REGION 1..224: note = MISC_FEATURE - pmCDA-1 polypeptide sequence
MAGYECVRVSEKLDFDTFEFQFENLHYATERHRTYVIFDVKPQSAGGRSRRLWGYIINNPNVCHAELILMSMIDRHLESNPGVYAMTWYMSWSPCANCSSKLNPWLKNLLEEQGHTLTMHFSRIYDRDREGDHRGLRGLKHVSNSFRMGVVGRAEVKECLAEYVEASRRTLTWLDTTESMAAKMRRKLFCILVRCAGMRESGIPLHLFTLQTPLLSGRVVWWRV

SEQ ID NO: 64 - protein, 331 aa, Petromyzon marinus
  REGION 1..331: note = MISC_FEATURE - pmCDA-2 polypeptide sequence
MELREVVDCALASCVRHEPLSRVAFLRCFAAPSQKPRGTVILFYVEGAGRGVTGGHAVNYNKQGTSIHAEVLLLSAVRAALLRRRRCEDGEEATRGCTLHCYSTYSPCRDCVEYIQEFGASTGVRVVIHCCRLYELDVNRRRSEAEGVLRSLSRLGRDFRLMGPRDAIALLLGGRLANTADGESGASGNAWVTETNVVEPLVDMTGFGDEDLHAQVQRNKQIREAYANYASAVSLMLGELHVDPDKFPFLAEFLAQTSVEPSGTPRETRGRPRGASSRGPEIGRQRPADFERALGAYGLFLHPRIVSREADREEIKRDLIVVMRKHNYQGP

SEQ ID NO: 65 - protein, 209 aa, Petromyzon marinus
  REGION 1..209: note = MISC_FEATURE - pmCDA-5 polypeptide sequence
MAGDENVRVSEKLDFDTFEFQFENLHYATERHRTYVIFDVKPQSAGGRSRRLWGYIINNPNVCHAELILMSMIDRHLESNPGVYAMTWYMSWSPCANCSSKLNPWLKNLLEEQGHTLMMHFSRIYDRDREGDHRGLRGLKHVSNSFRMGVVGRAEVKECLAEYVEASRRTLTWLDTTESMAAKMRRKLFCILVRCAGMRESGMPLHLFT

SEQ ID NO: 66 - protein, 158 aa, Saccharomyces cerevisiae
  REGION 1..158: note = MISC_FEATURE - yCD polypeptide sequence
MVTGGMASKWDQKGMDIAYEEAALGYKEGGVPIGGCLINNKDGSVLGRGHNMRFQKGSATLHGEISTLENCGRLEGKVYKDTTLYTTLSPCDMCTGAIIMYGIPRCVVGENVNFKSKGEKYLQTRGHEVVVVDDERCKKIMKQFIDERPQDWFEDIGE

SEQ ID NO: 67 - protein, 194 aa, synthetic construct
  REGION 1..194: note = cytidine deaminase polypeptide sequence
MKPQIRDHRPNPMEAMYPHIFYFHFENLEKAYGRNETWLCFTVEIIKQYLPVPWKKGVFRNQVDPETHCHAEKCFLSWFCNNTLSPKKNYQVTWYTSWSPCPECAGEVAEFLAEHSNVKLTIYTARLYYFWDTDYQEGLRSLSEEGASVEIMDYEDFQYCWENFVYDDGEPFKRWKGLKYNFQSLTRRLREILQ

SEQ ID NO: 68 - protein, 192 aa, synthetic construct
  REGION 1..192: note = cytidine deaminase polypeptide sequence
MADSSEKMRGQYISRDTFEKNYKPIDGTKEAHLLCEIKWGKYGKPWLHWCQNQRMNIHAEDYFMNNIFKAKKHPVHCYVTWYLSWSPCADCASKIVKFLEERPYLKLTIYVAQLYYHTEEENRKGLRLLRSKKVIIRVMDISDYNYCWKVFVSNQNGNEDYWPLQFDPWVKENYSRLLDIFWESKCRSPNPW

SEQ ID NO: 69 - protein, 280 aa, synthetic construct
  REGION 1..280: note = cytidine deaminase polypeptide sequence
MDPQRLRQWPGPGPASRGGYGQRPRIRNPEEWFHELSPRTFSFHFRNLRFASGRNRSYICCQVEGKNCFFQGIFQNQVPPDPPCHAELCFLSWFQSWGLSPDEHYYVTWFISWSPCCECAAKVAQFLEENRNVSLSLSAARLYYFWKSESREGLRRLSDLGAQVGIMSFQDFQHCWNNFVHNLGMPFQPWKKLHKNYQRLVTELKQILREEPATYGSPQAQGKVRIGSTAAGLRHSHSHTRSEAHLRPNHSSRQHRILNPPREARARTCVLVDASWICYR

SEQ ID NO: 70 - protein, 555 aa, synthetic construct
  REGION 1..555: note = pYY-BEM3.1; tr|F7B644|F7B644_HORSE polypeptide sequence
MPRGRARERQRRNPMEKLDAEAFSFHFLNMEFVYDRNCSYLCYQVEGRLSGSPVLSEQGVFPNEVCGKTRRHAELCFLDWFRGRLSPDEYYCVTWFISWSPCSNCAREVAEFLKRHRNVELSIFAARLYYCRDHEQGLQSLCNRGAQLAVMLRKDFTYCWDNFVHNSGREFSPWENIDANSDLLARKLEDLLKNPMEKLHRKTFSFHFRNLKFAKGRKCSYLCYRVEGRLSGSPGLSEQGVFLNEVCDENCRHAELCFLHWFRGRLSPHADYRVTWFISWSPCSNCAREVAEFLKQHRNVELHISAARLYYWQRNKPGLRNLRSSGAQLAIMFFWDFRDCWDNFVHNSGRHFIPWKKINVNSRLLATKLEDLLKNPLEKLHPNTFSFHFCNLEFAYDRKYSYLCYQVEGRLSGSPGLSEQGVFLNEVCGKTRCHAELCFLDWFRVRLSPDEYYRVTWFISWSPCFYCAREVADFLKQYRNVKLSIFAARLYYCRDHAQGLRSLCSSGAQLAIMFFWDFRYCWDNFVHNSGREFRPWKKINVNSRLLATKLEDILK

SEQ ID NO: 71 - protein, 437 aa, synthetic construct
  REGION 1..437: note = pYY-BEM3.2; tr|D1LZA1|D1LZA1_PANTI polypeptide sequence
MEPWRPSPRNPMDRIDPKTFRFQFPNLRYASGRKLCYLCFQVERDYFYYNDSDWGVFRNEVHPWAPCHAEQCFLSWFRDQYPYRDEDYNVTWFLSWSPCPTCAEEVVEFLEEYRNLTLSIFTSRLYYFWHPNYQEGLCKLWDAGVQLDIMSCDEFEYCWDNFVYHKGMRFQRRNLLKDYDFLAAKLQEILSPGQQRKRDWPFPPRPGAQVDPRSWVQEVTEPGINTRRHPLHLLVSFLLPRPTMNPLQEDIFYRQFGNQHRVPKPYYYRRKTYLCYQLKLPEGTLIDKDCLRNKKKRHAEICFIDKIKSLTRDTSQRFEIICYITWSPCPFCAEELVAFVKDNPHLSLRIFASRLYVHWRWKYQQGLRHLHASGIPVAVMSLPEFEDCWRNFVDHQDRLFQPWRNLDQYSESIKRRLGKILTPLNDLRNDFRNLKLE

SEQ ID NO: 72 - protein, 440 aa, synthetic construct
  REGION 1..440: note = pYY-BEM3.3; tr|A0A3Q0DM17|A0A3Q0DM17_TARSY polypeptide sequence
MPMKRMYSNIYFDHFNNQRLLSGQNAPWLCFKVERVENCMLVPLETGVFGNQVSGCCGKTERPVEPTSLTRSVLVSPNPGTELRAQQPSRKGHLGKLGCVEYPSPGLALVMLGYGASTYCPDSSMYCPETCHHPEMCFLYWFEKTLSHEEQYQITWYVSWSPCVNCAEEVAEFLSVHPKVNLTIYAARLYCYQKLNHRQGLRRLCKEGACVKIMNYEEFDHCWENFVYNNYKSFKPWVKLQDNYELLATELDKILRIPMERMPQKKFRFHFQNLIAKDRNTTWLCFEVKNVRKKHPPDLLERGIFQNQVTPRINCHAEMCFLSWFLENMLLHGKRYQVTWYISWSPCSICAEEVAEFLSAHPKVSLTIYAARLYYFWVPGYRQGLRRLVEEGARVEIMNYEEFDYCWENFVSINNEPFQPWEGLHEKYGYLVTKLNNILG

SEQ ID NO: 73 - protein, 453 aa, synthetic construct
  REGION 1..453: note = pYY-BEM3.4; tr|A0A3Q0DNJ5|A0A3Q0DNJ5_TARSY polypeptide sequence
MEDNPEPRPRQQMDQDTFIFNFNNDPSVRGRHQTFLCYEVEHLDDDTWVPQDKYLGFLHNQPQSRSNAYCAYHAELCFLELVSSWQLDPAQRYRVTCFISWSPCSSCAQEVAAFLKKNRHVTLRILAARIYDYYQGYEDGLRTLQGVGVDITVMTSAEFGHCWNTFVDHQGSPFQPWEGLDQHSQVIWQRMQDILQVIPAKYLMEKVKYTVTVDILFKGRVPGPRYLMDQNTFTRNFINNLSVSGRRQTLLCYEVERLGGDIWVPLDQLRGFLLSQARDVLNYYQGRHAEPCFLDLVSSWQLDPAQHYRVTWFISWSPCTSCAQAVAAFLRENRHVTLRILAARIYDYHQGYEEGLRTLQRTGAHIDIMTFKEFGHCWNTFVNHKGSPFKSWTGLDQHSQALRKRLQDILHTMASSLWDQSEPKKPIPSQEVTLPESIPPSHGNRFRLVKRPS

SEQ ID NO: 74 - protein, 424 aa, synthetic construct
  REGION 1..424: note = pYY-BEM3.5; tr|G5AYU5|G5AYU5_HETGA polypeptide sequence
FCFLSCVHRKPIERIYKKAFRFYFRNLRCAYGRNKTFLCYEVKRERDNKVLHKGVVLNQVEPYMPLHAELRFLSWFHDTLLCPLGSYQVTLYVSWSPCSECAEELTTFLAGHRNVTMTIYVAQLYYCNWKSPNREGLKILIAEDARLRVMFYDEFLYCWRNFVKNDYNNFDPWSLLDENSRYHNRILQNILKGWGRPHRVGPEGEQTATPGGSGGHCISVFSLLRRREMTLKEETFRVQFNNAYKAPKPYRRRVTYLCYQLQEANGDPLTKGCLRTKKGYHAESRFIKRICSMDLGQDQSYQVTCFLTWSPCPHCAQELVSFKRAHPHLRLQIFTARLFFHWKRSYQEGLQRLCRAQVPVAVMGHPEFAYCWDNFVDHQPGPFEPPWAKLEYYSSCLKRRLQQILRSWGVDDLTNDFRNLQLGP

SEQ ID NO: 75 - protein, 385 aa, synthetic construct
  REGION 1..385: note = pYY-BEM3.6; tr|A0A2Y9QMV5|A0A2Y9QMV5_TRIMA polypeptide sequence
MLSSPQTPGTRKPMKTLAPDEFSFNFENLRLAHGRNTTFLCFQVETKAPPSLNSPDSGIFQNQDHCPSHHHAEMVFLTWFQKRLSPAQHYEVTWYMSWSPCSRCAVQVAKFLKSNSTVNLSIFVARLYYPRELETKDGLHSLWQAGAQVQIMFFQDFKYCWENFVNNEGKPFQPWKNLDENSKDWDTELKDIHRNTTDLLTEEMFYSQFYNREKKSSIPRKTYLCYQLNEPQPVKRCLHYKKGYHAVTRFIDGIVSMNLDPARSYDITCYFTWSPCNRYARKLVSFIEDYPNLRLKVYTSRLYFHWCWTNMQGLQHLQNSRVTVAVMTFRDFEYCWKNFVDNQGKPFEPWEKLDLYSQSTERRLRRILKPLTPDVLNEDFGNLHL

SEQ ID NO: 76 - protein, 381 aa, synthetic construct
  REGION 1..381: note = pYY-BEM3.7; tr|H0XHI0|H0XHI0_OTOGA polypeptide sequence
LSCAFRDPMNRMYPKTFCQNFEKEPCPSNQNSSWLCFEVETKNSAVFFHRGVFRNQPAPPPRAPTSVLLSQGPVKTPCHAEECFLTWIQGVLPPDHHYHVTWYVSRGPCANCANLIVHFLAMHRRVTLTIFAAHLNFFWESDFQQGLLRMDQEGVQLHIMGYEEFEYCWDNFVYNQRKQFVPWNGLNENYEFMVSTLEDILRSPLDRIRQKDFSIHFRNSLWLDDKSTWLCFEVKRTKSPVPLYRGVFRNQSPPKTPCHAEVRFFTWLQDLPPDFCCQFTWYLSWSPCADCADLVANFLAKHRNVSLTIFVARLYYYRDPEMHRGLRRMYQEGANVDIMSVIEFEYCWDNFVYNQGKQFVPWNGLNENYEFLVPRLQEILE

SEQ ID NO: 77 - protein, 337 aa, synthetic construct
  REGION 1..337: note = pYY-BEM3.8; tr|A0A3M0K4Y7|A0A3M0K4Y7_HIRRU polypeptide sequence
MYISKKALRRHFDPRVYPRETYLLCELQWEGSRRVWIHWIRNVPDHHAEEYFLEEVFEPRNYGFCNITLYLSWSPCCTCCSKIRDFLKRNPNVKIDIRVARLIYPDYAETRSSLRELNGLQRVSIQVMEAAGLSCIESKNHRISQVERDPKGSSSPTLFTLQDHLKLSNMTESVIQDSVSIQICYQMRILGFQCHIRWKLQPEDFQRNYSPNQIGRVVYLLYEVRWRRGSIWRNWCSNNPEQHAEVNFLENHFHHRPQTPCSITWFLSTSPCGKCSRRILEFLKSQPNVTLEIYAAKLFRHHDIRNRQGLRNLMMNGVTIYIMNLEGNPASLCLSVD

SEQ ID NO: 78 - protein, 237 aa, synthetic construct
  REGION 1..237: note = pYY-BEM3.9; tr|A0A3P4LUZ8|A0A3P4LUZ8_GULGU polypeptide sequence
MSFEDYEYCWETFVDHKGMYFQSWDLLRDNDLLAAELKNILRSTMNPLRQEIFYHQFGNQPRAPRPYHRRKTYLCYQLQPHEGPITARVCLQNKKKRHAEIRFIDNIRALRLDRSQTFEITCYLTWSPCPTCAKALAVFVQDHPHISLRLFASRLFIHWCWKYQEGLRLLHRSRIPVAVMRLQEFEDCWRNFVDNQDEPFQPWNKLEQYSESITRRLRRILGHPQNNLENDFRNLHI

SEQ ID NO: 79 - protein, 221 aa, synthetic construct
  REGION 1..221: note = pYY-BEM3.10; tr|G5BPM8|G5BPM8_HETGA polypeptide sequence
RRRIEPWQFEASFDPRQLRRETCLLSEVRWGTSPRAWRGCSLNTARHAEVSFMDRLTSEGRLRGPVRCSITWFLSWSPCGACAQAIGEFLRQHPNVSLVIYIARLFWHVDEQNRQGLRDLVTRGVRMQVMSDPEFAHCWRNFVNYSPGQEARWPQVPPVWTWLYSLELHCILLNLPPCLKISRRHHNQLTFFQLILQNCHYQAIPSPVLLASGLIHPFVTW

SEQ ID NO: 80 - protein, 211 aa, synthetic construct
  REGION 1..211: note = pYY-BEM3.11; tr|H2M862|H2M862_ORYLA polypeptide sequence
MITKLDSVLLPKKKFIYHYKNMRWARGRHETYLCFVVKRRVGPESLSFDFGHLRNRNGCHVELLFLRHLSALCPGLWGYGATGQGRVSYSITWFCSWSPCANCSFRLAQFLSQTPNLRLRIFVSRLYFCDLEDSREREGLRMLKKVGVHITVMSYKDYFYCWQTFVARKQSKFKPWDGLHQNSVRLSRKLNRILQPCETEDFRDAFKLLGL

SEQ ID NO: 81 - protein, 353 aa, synthetic construct
  REGION 1..353: note = pYY-BEM3.12; tr|H0Y0C6|H0Y0C6_OTOGA polypeptide sequence
MYLKTFYRHFNNRPYLSRRNDTWLCFEVKTTSSNSPGSFYSGVFRNQGPRYCPWHTELCFLTWVRPIVSHHHFYQITWYMSWSPCANCAWQVATFLATHENVSLTNYTVRIYYFWRQDYRQGLLRMIEEGTQVYVMSSKEFQHCWENFVDHWGTRWVTCWNRLKKNYEFLVTRLSEILSDPKERISPNTFYNQFNNTPVPRGRKDTWLCFEVKEKNSNSPGSFHRGVFQNQVFSGTSSHARRCPPDHHYEVTWYTSWSPCAHCAWHVVNFLTSNPNVSLTIFAARLYYIYRPEIQQGLRRVFQEGAKVHIMSLKEFKYCWAKLVYNSGMRFMPWYQFNFNFLFPNTTLKGDLH

SEQ ID NO: 82 - protein, 189 aa, synthetic construct
  REGION 1..189: note = pYY-BEM3.13; tr|A0A3Q2Z5X6|A0A3Q2Z5X6_HIPCM polypeptide sequence
MDVHFMNFIYHYKNMRWAKGRNETYLCFVVKRRVGPNSLTFDFGHLRNRNGCHVELLFLRYLGRRLSYSITWFCSWSPCANCSAALSQFLSRMPNLRLRIFVARLYFCDMEDSHEREGLRLLQKAGVQVTVMSYKDYYYCWQTFVDRKKSHFKAWEDLHQNSVRLSRKLNRILQPCEMDLRDAFKLLGL

SEQ ID NO: 83 - protein, 190 aa, synthetic construct
  REGION 1..190: note = pYY-BEM3.15; tr|A0A2K6NY90|A0A2K6NY90_RHIRO polypeptide sequence
MNPHIRNPMEAMYPGTFYFHFKNLWEADNRNESWLCFAVEVIKHHSTVSWKRGVFRNQVDPETHCHAEKCFLSWFCDNTLSPKKNYQVTWYTSWSPCPECAREVAKFLARHSNVMLTIYTARLYYSQYPNYQEGLRRLNEEGVPVEIMDYEDFKYCWENFVYNGDELFKPWKGLKYNFLFLDSKLQEILE

SEQ ID NO: 84 - protein, 202 aa, synthetic construct
  REGION 1..202: note = pYY-BEM3.16; tr|Q6ICH2|Q6ICH2_HUMAN polypeptide sequence
MNPQIRNPMERMYRDTFYDNFENEPILYGRSYTWLCYEVKIKRGRSNLLWDTGVFRGPVLPKRQSNHRQEVDPETHCHAERCFLSWFCDDILSPNTNYEVTWYTSWSPCPECAGEVAEFLARHSNVNLTIFTARLCYFWDTDYQEGLCSLSQEGASVKIMGYKDFVSCWKNFVYSDDEPFKPWKGLQTNFRLLKRRLREILQ

SEQ ID NO: 85 - protein, 202 aa, synthetic construct
  REGION 1..202: note = pYY-BEM3.17; tr|G8GPV1|G8GPV1_CERNE polypeptide sequence
MDGSPASRPGHVMDPGTFTSNFNNKPWVSGQRETYLCYKVERSHNDTWVLLNQHRGFLRNQAKNRLHGDYGCHAELCFLGEVPSWRLDPTQTYRVTWFISWSPCFSGGCAEQVRAFLQENTHVRLRIFAARIYDYDFLYQEALRTLRDAGAQVSIMTYEEFKHCWDTFVDHQGRPFQPWDGLDEHSQALSGRLQAILQNQGN

SEQ ID NO: 86 - protein, 181 aa, synthetic construct
  REGION 1..181: note = pYY-BEM3.18; tr|Q1WBT6|Q1WBT6_SYMSY polypeptide sequence
MALLTAKTFRLQFNNKRRVTKPYYPRKALLCYQLTPQNGSTPTRGYFKNKKKRHAEIRFINKIKSMGLDETQCYQVTCYLTWSPCPSCAWELVDFIKAHDHLNLGIFASRLYYHWCRHQQEGLRLLCGSQVPVEVMGFPEFADCWENFVDHEEPLSFNPSEMLEELDKNSRAIKRRLEKIK

SEQ ID NO: 87 - protein, 211 aa, synthetic construct
  REGION 1..211: note = pYY-BEM3.19; tr|A0A3B4CS14|A0A3B4CS14_PYGNA polypeptide sequence
MDNTNRRKFIYHYKNVRWARGRHETYLCFVVKKRNSPDSLSFDFGHLRNRNGCHVELLFLRYIEVLCPGLWGSGVDGVRVSYAVTWFCSWSPCSNCAQRLTNFLSQTPNLRLRIFVARLYFCDEEDSLEREGLRHLQRAGVQITVMTYKDFFYCWQTFVASRERCFKAWEGLRQNSVRLSRKLNRILQVFISTPVISPLITTHLGQSWAGG

SEQ ID NO: 88 - protein, 315 aa, synthetic construct
  REGION 1..315: note = pYY-BEM3.20; tr|A0A087XZI4|A0A087XZI4_POEFO polypeptide sequence
RKVSYSVTWFCSWSPCANCSIRLAQFLHQTPNLRLRIFVSRLYFCDLEDSREREGLRILKKAGVHITVMSYKDYFYCWQTFVAKSQSKFKPWDGLHQNYIRLSRKLNRILQPALDIKKFIYHYKNLRWARGRCETYLCFVVKKKLHLFMFVIVGRNRLFDLNVTMNNKSLYLIPLHLQLLFLRHLGALCPGLWGYGVTGERKVSYSVTWFCSWSPCANCSIRLAQFLHQTPNLRLRIFVSRLYFCDLEDSREREGLRILKKAGVHITVMSYKDYFYCWQTFVAKSQSKFKPWDGLHQNYIRLSRKLNRILQVQFF

SEQ ID NO: 89 - protein, 189 aa, synthetic construct
  REGION 1..189: note = pYY-BEM3.21; tr|A0A341AEK4|A0A341AEK4_9CETA polypeptide sequence
MASDRGPSAGDATSRRRIEPWEFEVSFDPRELCKETRLLYEIKWGRSQHVWRHSGKNTTNHVECNFIEKFTSERPFHRSVSCCITWFLSWSPCWECSKAIREFLNQHPRVTLFIYVARLFQHMDPQNRQGLRDLIHSGVTIQIMGPTEYDYCWRNFVNYPPGKEAHWPRYPPPLMKLYALELHCIILVP

SEQ ID NO: 90 - protein, 180 aa, synthetic construct
  REGION 1..180: note = pYY-BEM3.22; tr|E2D879|E2D879_MUSMI polypeptide sequence
RNLISRETFNFNFENLCYAKGRKNTFLCYEVTRKDCDSPVSLCHGVFKNKGSIHAEICFLYWFHDKVLKVLTPREEFKVTWYMSWSPCFECAEQVVRFLATHHNLNLTIFSSRLYNVSDPDTQQKLCRLVQEGAQVAVMDLSEFKKCWEKFVDNDGQQFRPWKRLRTNFRYQNSKLQEIL

SEQ ID NO: 91 - protein, 221 aa, synthetic construct
  REGION 1..221: note = pYY-BEM3.23; tr|A0A2K5RDN6|A0A2K5RDN6_CEBCA polypeptide sequence
MWEAQSPGLSREWGSVAISPEDPGPLHIGRFLSCAFRHPMNAMYPGIFNFHFRNLRKAYGRNETWLCFTVEGIMNRSTVSWKSGVFRNQVGSDPFCHAEMCFLSWFRHNMLSPKKDYEVTWYASWSPCPECAGQVAEFLARHGNVRLTIFTAHLYYFWNPSFRQGLRRLSQEGASVLIMGYEDFEYCWDNFVYNDGQPFKPWKRLQDNSLSLYITLQEILQ

SEQ ID NO: 92 - protein, 206 aa, synthetic construct
  REGION 1..206: note = pYY-BEM3.24; tr|A0A2K5RDN7|A0A2K5RDN7_CEBCA polypeptide sequence
MEASPASRPRPLMGPRTFTENFTNNPEVFGRHQTYLCYEVKCQGPDGTRDLMTEQRDFLCNQARNLLSGFDGRHAERCFLDRVPSWRLDPAQTYRVTCFISWSPCFSCAREVAEFLQENPHVNLRIFAARIYDCRPRYEEGLQMLQNAGAQVSIMTSEEFRHCWDTFVDHQGHPFQPWEGLDEHSQALSRRLQAILQGNRWMILSL

SEQ ID NO: 93 - protein, 184 aa, synthetic construct
  REGION 1..184: note = pYY-BEM3.25; tr|A0A1C9CJ69|A0A1C9CJ69_CERAL polypeptide sequence
NPMKAMDPHIFYFHFKNLRKAYGRNETWLCFAVEIIKQRSTVPWRTGVFRNQVDPESHCHAERCFLSWFCEDILSPNTDYRVTWYTSWSPCLDCAGEVAEFLARHSNVELAIFAARLYYFWDTHYQQGLRSLSEKGASVEIMGYEDFKYCRENFVCDDGKPFKPWKGLKTNFRFLKRRLQEILE

SEQ ID NO: 94 - protein, 197 aa, synthetic construct
  REGION 1..197: note = pYY-BEM3.26; tr|A0A2R2Z4D2|A0A2R2Z4D2_PTEAL polypeptide sequence
MHLQVWRKVTEAWREGYTLKPWSRNPMERLYHDYFYFHFYNLPTPKHRNGCYICYQVEGTKKHSRMPLLRGVFENQESLDMMLSPGEKYRVTWYISWSPCFACVDEVIKFLREHTNVELIIFAARLYHSDILQYRQGLRKLHDAGVHVAIMSYYEFKHCLNDFVFHQGRSFCPWNDLNKNSKNLSNTLEDILRNQED

SEQ ID NO: 95 - protein, 206 aa, synthetic construct
  REGION 1..206: note = pYY-BEM3.27; tr|B7T161|B7T161_SHEEP polypeptide sequence
MTEGWAGSGLPGRGDCVWTPQTRNTMNLLRETLFKQQFGNQPRVPPPYYRRKTYLCYQLKELDDLMLDKGCFRNKKQRHAEIRFIDKINSLNLNPSQSYKIICYITWSPCPNCASELVDFITRNDHLNLQIFASRLYFHWIKPFCRGLHQLQKAGISVAVMTHTEFEDCWEQFVDNQLRPFQPWDKLEQYSASIRRRLQRILTAPT

SEQ ID NO: 96 - protein, 205 aa, synthetic construct
  REGION 1..205: note = pYY-BEM3.28; tr|A0A2R2X2G4|A0A2R2X2G4_PTEAL polypeptide sequence
MAGLGQACEGCCGQMPEISYPMGRLDPKTFSFEFKNLPYAYGRKSSYLCFQVEREQHSSPVPSDWGVFKNQFCGTEPYHAELCFLNWFRAEKLSPYEHYDVTWFLSWSPCSTCAEEIAIFLSNHKNVRLNIFVSRIYYFWKPAFRQGLQELDHLGVQLDAMSFDEFKYCWENFVDNQGMPFRCWKKVHQNYKSVLRKLNEILRRR

SEQ ID NO: 97 - protein, 309 aa, synthetic construct
  REGION 1..309: note = pYY-BEM3.29; tr|G1Q1M4|G1Q1M4_MYOLU polypeptide sequence
YAELSFLDLFQSWNLDRGRQYRLTWYMSWSPYPDCAQKLVEFLGENSHVTLRIFAADIHSLCSGYEDGLRKLRDARAQLAIMTRDELQYCWVTFVDNQGQPFRPWPNLVEHIKTKKQELKDILGNPMRRMYPKTFNFNFQNLNSYGRKSTFLCFEVETWEDGSVLDYQNGVFQNQLDPGHAELCFIEWFHEKVLFPDEVRCPDAQYHVTWYISWSPCFECAEQVAGFLNEHENVDLSISAARLYLCEDEDEQGLQDLVAAGAKVAMMAPEDFEYCWDNFVYNRGWPFTYWKHVRRNYGRLQEKLDEILW

SEQ ID NO: 98 - protein, 216 aa, synthetic construct
  REGION 1..216: note = pYY-BEM3.30; tr|A0A1S3AN78|A0A1S3AN78_ERIEU polypeptide sequence
RRIEPWEFEDFFDPRQFRPETCLLYEVRWGSSRNAWRSTARNTTRHAEVNFLERFAAERHFDKPVSCSITWFLSWSPCWECSQAIGAFLSQHPQVTLAIHVTRLFHHEDEQNRQGLRDLLARGVTLQVMGDSEYAHCWRTFVNSPPGAEGHYPRYPSDFTRLYALELHCIILGLPPCLEILRRYQNQFTLFRLVPQNCHYQMIPHLNFFVVRHYFF

SEQ ID NO: 99 - protein, 201 aa, synthetic construct
  REGION 1..201: note = pYY-BEM3.32; tr|Q4VUI3|Q4VUI3_XENLA polypeptide sequence
MTMDSMLLKRNKFIYHYKNLRWARGRHETYLCYIVKRRYSSVSCALDFGYLRNRNGCHAEMLFLRYLSIWVGHDPHRNYRVTWFSSWSPCYDCAKRTLEFLKGHPNFSLRIFSARLYFCEERNAEPEGLRKLQKAGVRLSVMSYKDYFYCWNTFVETRESGFEAWDGLHENSVRLARKLRRILQPPYDMEDLREVFVLLGL

SEQ ID NO: 100 - protein, 191 aa, synthetic construct
  REGION 1..191: note = pYY-BEM3.33; tr|E2RL86|E2RL86_CANLF polypeptide sequence
MNPLQEETFYQQFSNQRVPKPTYQRRTYLCYQLKPHEGSVIAKVCLQNQEKRHAEICFIDDIKSRQLDPSQKFEITCYVTWSPCPTCAKKLIAFVNDHPHISLRLFASRLYFHWRQKYKRELRHLQKSGIPLAVMSYLEFKDCWEKFVDHKGRPFQPWNKLKQYSESIGRRLQRILQPLNNLENDFRNLRL

SEQ ID NO: 101 - protein, 226 aa, synthetic construct
  REGION 1..226: note = pYY-BEM3.34; tr|G1LWB0|G1LWB0_AILME polypeptide sequence
SSAAPASIHLLDEDTFTENFRNDDWPSRTYLCYKVEGPDQGSGVPLGQDKGILHNKPAQGPEPSRHAECYLLEQIQSWNLDPKLHYGVTCFLSWSPCAKCAQKMARFLQENSHVSLKLFASRLYTRERWDEDYKEGLRTLKRAGASIAIMTYREFEHCWKTFVLHDQEGSCFQPWPFLHKESQKFSEKLQAILQVGVLLLSLPPPLPSSPLSSPWPFPAPLRASTG

SEQ ID NO: 102 - protein, 238 aa, synthetic construct
  REGION 1..238: note = pYY-BEM3.35; tr|A0A1U7S7K7|A0A1U7S7K7_ALLSI polypeptide sequence
MGEHWQYAGSGEYIPQDQFEENFDPSVLLAETHLLSELTWGGRPYKHWYENTEHCHAEIHFLENFSSKNRSCTITWYLSWSPCAECSARIADFMQENTNVKLNIHVARLYLHDDEHTRQGLRYLMKMKRVTIQVMTIPDYTYCWNTFLEDDGEDESDDYGGYAGVHEDEDESDDDDYLPTHFAPWIMLYSLELSCILQGFAPCLKIIQGNHMSPTFQLHVQDQEQKRLLEPANPWGAD

SEQ ID NO: 103 - protein, 220 aa, synthetic construct
  REGION 1..220: note = pYY-BEM3.36; tr|A0A2R2X2J8|A0A2R2X2J8_PTEVA polypeptide sequence
MPRIGNMNLLSEKTFNYHFGNQLRVKKPQGRRRTYLCYKLKLPNETLVKGYFINKKKNHAEIRFINKIRSLNLDQTQSYKITCYITWSPCSYCAGKLVALVKSCPHLSLQIFTSRLYYHWLWKNQAGLRYLWKINISVLVMKEPEFADCWDNFVNHQSRRFKPWEKLTQYSNSTERRLLRILRINRTDLFLAQSSEQDPGLNDLVDAIKRLFLDAHRPRD

SEQ ID NO: 104 - protein, 198 aa, synthetic construct
  REGION 1..198: note = pYY-BEM3.37; tr|A0A151P6M4|A0A151P6M4_ALLMI polypeptide sequence
MAVEEEKGLLGTSQGWKIELKDFQENYMPSTWPKVTHLLYEIRWGKGSKVWRNWCSNTLTQHAEVNCLENAFGKLQFNPPVPCHITWFLSWSPCCQCCRRILQFLRAHSHITLVIKAAQLFKHMDERNRQGLRDLVQSGVHVQVMDLPDYRYCWRTFVSHPHEGEGDFWPWFFPLWITFYTLELQHILLQQHALSYNL

SEQ ID NO: 105 - protein, 158 aa, synthetic construct
  REGION 1..158: note = pYY-BEM3.38; tr|A0A2K6MNR2|A0A2K6MNR2_RHIBE polypeptide sequence
IWLCFTMEIIKQCSTVSWKRGVFRNQVDPETHCHAERCFLSWFWEDTLSPNTNYQVTWYTSWSPCLDCAGEVAEFLARHSNVKLAIFAARLYYFWDTDYQQGLRSLSEEGTSVEIMGYEDFKYCWENFVYNGDEPFKPWKGLKYNFLFLDSKLQEILE

SEQ ID NO: 106 - protein, 182 aa, synthetic construct
  REGION 1..182: note = pYY-BEM3.40; tr|F1CGT0|F1CGT0_ANOCA polypeptide sequence
KAAILLSNLFFRWQMEPEAFQRNFDPREFPECTLLLYEIHWDNNTSRNWCTNKPGLHAEENFLQIFNEKIDIKQDTPCSITWFLSWSPCYPCSQAIIKFLEAHPNVSLEIKAARLYMHQIDCNKEGLRNLGRNRVSIMNLPDYRHCWTTFVVPRGANEDYWPQDFLPAITNYSRELDSILQD

SEQ ID NO: 107 - protein, 230 aa, synthetic construct
  REGION 1..230: note = pYY-BEM3.41; tr|C7AGG3|C7AGG3_HORSE polypeptide sequence
MDPQAPTQRGGLGQAYQGGDYVQAPGNGNTQHLLSEDVFKKQFGNQRRVTKPYYRRKTYVCYQLKLLRGPTIAKGYFRNKKKRHAEIRFIDKINSLGLDQDQSYEITCYVTWSPCATCACKLIKFTRKFPNLSLRIFVSRLYYHWFRQNQQGLRQLWASSIPVVVMGYQEFADCWENFADNRGNPFQSWEKLTEYSKGIKRRLQKILEPLNLNGLEDAMGNLKLGSVDLG

SEQ ID NO: 108 - protein, 197 aa, synthetic construct
  REGION 1..197: note = pYY-BEM3.42; tr|A0A250YMK7|A0A250YMK7_CASCN polypeptide sequence
MSLLKEDIFLYQFNNQQQVQKPYFRRRTYLCYQLEQPNGSRPQWPAKGCLQNKKGHHAEIRFIKRIHSMGLEQDQDYQITCYITWSPCLACACALAELKNHFPRLTLRIFASRLYFHWIRKFQMGLQHLYKSGVLVAVMSLPEFTDCWEKFVNHRQVFFTPWDKLEEHSRSIQRRLRRILQSWDVDDLTDDFRNLRL

SEQ ID NO: 109 - protein, 189 aa, synthetic construct
  REGION 1..189: note = pYY-BEM3.43; tr|B7T160|B7T160_SHEEP polypeptide sequence
MPWISDHVARLDPETFYFQFHNLLYAYGRNCSYICYRVKTWKHRSPVSFDWGVFHNQVYAGTHCHSERRFLSWFCAKKLRPDECYHITWFMSWSPCMKCAELVAGFLGMYQNVTLSIFTARLYYFQKPQYRKGLLRLSDQGACVDIMSYQEFKYCWKKFVYSQRRPFRPWKKLKRNYQLLAAELEDILG

SEQ ID NO: 110 - protein, 541 aa, synthetic construct
  REGION 1..541: note = pYY-BEM4.1; tr|A0A182D0J1|A0A182D0J1_BLAVI polypeptide sequence
MTNPESPPQAPCDFNEDALLNREPLRGSPIKFVSPVDYPDLVFALAGPVGVDIDYIQQSISDCLKSFDYSTEFIRITEIMQDIKCSKTIDCTDMLKEYQSKIEYANELRRAYRAKDLLAALTISAISKLREQIKERDEATNKSNIQPSRRKLAWVVRQLKTPEEVRLLRAVYGKQFVLVSIYSSPQRREDFLISKIKIKSRGTIDNNTSSEGAQRLIERDSKEDNEYGQNLSGTFCLGDIFVDSNNKESAIVSIDRFLNAFFGSNEISPTRDEYGMYLAKTASLRSCDLSRQVGAAIFSKTGEIISLGSNEVPKAGGGTYWTGDNADSRDIRLGHDPNEINKVEIFAEIISRLLEDKLLSNDLLNKDAASIVTILLSKNEGKRYKDLRVMDIIEFGRIIHAEMSAICDAARNGRAIIGATLFCTTFPCHLCAKHIVASGIGRIVYLEPYPKSYAKKLHSDSIQVEDHSDSEKVSFEPFIGISPSRYRELFEGGRRKDPFGEALKWKNDPRKPVIDVVVPPHFEAEKLVIAQLGKLIVSGTG

SEQ ID NO: 111 - protein, 330 aa, synthetic construct
  REGION 1..330: note = pYY-BEM4.2; tr|A0A2D6EXD2|A0A2D6EXD2_9ARCH polypeptide sequence
MIIGLVGTIGAGKQTIIDYLQEKYGYNALSCSDVLREILKKQGKPVTRDNLREIGNKTREEGGNGAIAKILLEKLRNNWKANYIVDSLRHPDEVSVLRTSPLFHLVAVDADLRIRFERVKARKREEEPTTLPAFVERDQKEMFGTGNEQRIRETMELADELVLNNGTVEELKQRIDDLNLVSDERLRPSWDDYFMRLARLAAQRSNCMSRKVGAIITKDRRVIATGYNGTPRGVKNCNEGGCERCNSAVAKGTAISECLCLHGEENAIIEAGRVRSEGATIYTSFLPCLWCTKMIIQAGLKEVVFSEVYDLHEASIKLFETSGVLIRRLK

SEQ ID NO: 112 - protein, 367 aa, synthetic construct
  REGION 1..367: note = pYY-BEM4.3; tr|F7YVM7|F7YVM7_9THEM polypeptide sequence
MNEFKYMSLALKLAKKGKYTTSPNPMVGAVIVKDGKILATGYHKKAGQPHAEINALSKLNFQAQNCEMYVTLEPCSHYGRTPPCADAIIRSGIRKVVIATLDPNPLVNGKGVEKLKNAGIEVVCGVLEEKAKKLNEKFFKYITTKIPFVALKIAQTLDGKIALKNGESKWITSEKSREYVHKLRMEYDAVLTGIGTILKDDPQLNVRLKKVYKQPLRIILDSKLKIPLSAKVLEDPSKVIILTTALADKEKLEELRSKGVEVIITNEKNGIVDLESALKILGEKKITSVMVEAGPTLLTSFLKESLFDKIYLFIAPKIFGADSKSVFSELGLEDISKSQKFSLESVKKIGEDLLLELYPKQLKKLEE

SEQ ID NO: 113 - protein, 449 aa, synthetic construct
  REGION 1..449: note = pYY-BEM4.4; tr|A0A3M6UNF1|A0A3M6UNF1_9CNID polypeptide sequence
MEEKSELENELMRSTSPKPSVPNGSKGNECEQRETRITKENLYMVLALWMEEFPVVEQTSSAKRLNKVGVVFVLPTDRVLAADCSRDGVHGVARVMVNHCGKLEGCKVFVSRKPCSLCAKLLVQSKVSRVFYLPIEPESENKGEIARADNLFKNSSVGQSVFVPCVEQKVLDKLEDKLPKEIITPDDISECRDNLLKKCGWSAEWFARAQASLPWPCFEGKMKSQVDNDFKSLIKWIAVVKAPMDKGVAFPKVKLTSDSRVVPDCDADNFPDSKTAYHMMIFAKMLARQTDDPKTGVGAVIVRGKVPDIVSLGWNGFPSKALYGEFPRASDDDRALQKKFPYVIHAEQNALMVRNVKDLTDGILFVTKPPCDECAPMIKLSGVKTIVIGEKIEKSRGGELSYNLIKEYIKEGIMTCYQMEATKTKAKRLASDPETRKRLKSSCSNSNDV

SEQ ID NO: 114 - protein, 414 aa, synthetic construct
  REGION 1..414: note = pYY-BEM4.5; tr|A0A2G3K826|A0A2G3K826_9BURK polypeptide sequence
MTKIIDDVNTAAAAVLDQATAAANQTTFAVGGVMVNNQTGEVISAIHNNVIIPLSNNVSFTFDPTAHGERQLVYWYYANKEALKLPEPNQITVITSLDPCAMCTGALLTAGFNVGVVAIDTYAGINCAQNFQFATLPANLRTKAQKNFGYYASGAANFKPLTRSYVGGPSVAFKNGVVTPANLRDCGTVFTQSVDTVRNTSNSTGLAPSQMSNPAELPSNSAILQAYRAIYKKAFTIKIDNPRLPDAQILTELKAVLADAPNARNAVAFIDPFGNLVLCMADAFNTSPVHAAFMNVTQEYAKTRWDLMNKYAQASTTDNPALYLTHPKYGTFVYLYAPDPDDSITIMSLGAYGSTMEGPIPNMFPSNLQFYYPPRNGAQFSELVPVVNELPPFYTQNVNISLMQVPGVTQAPTK

SEQ ID NO: 115 - protein, 308 aa, synthetic construct
  REGION 1..308: note = pYY-BEM4.6; tr|K1ZCJ4|K1ZCJ4_9BACT polypeptide sequence
MSSRAKKNRSTNLKKSIGQKSIENKPTDQKKDQVLVAYVPVIHEGYRRFFRHFPAVKELWLISQELSHELRSLQKDIRALKASETKKLLQTWGQFQKIKLLTPSSLAILQKTTTQLVFPDEEISHHLVEKYFAQNRVLFASFFLRWDKKSSLKKHDLQEYSEISNKEFDQMMIAIAQQEADKSDDWWRQVGGLIFKDETILLLAHNQHTPTEAEAYFAGDPRADFHQGEYLKISTAIHAEAYLIAQAAKQGISLEGADLYVTTFPCPVCAKQVAYSGIKRVFFREGYSLLDGETILKANGVKLIRVTV

SEQ ID NO: 116 - protein, 615 aa, synthetic construct
  REGION 1..615: note = pYY-BEM4.7; tr|A0A1G3PNQ8|A0A1G3PNQ8_9SPIR polypeptide sequence
MRDLPLLVLGLTGPMGAGCTRFARDISKMEPGKVIKKQGLLDQVAHEISELSKKASEIRLQCISNGKNSELAELKRLNRRLNAKLAERACLHVIAKSSLPEPLFISLNTIVIKIAVDSITAPEFAEWAKNHAKVADLLKWLRTQWESELTLYETWGQDAGRFSQDELEKMDAMFAEFERIGDEILKEDFETYFGKRNNDFSIRMFSENIRLSGNPFRPAENGGGGGKYDEPSMVMIARETDRYIRFYRTRSDQKRSHFFIIDEIKNPREAEYFRARHQNFFLVSIFSSSEIRASRMRRGLGHDAGVSDADFQHLFRELDSRDWGADDFDAHGLHRQNIYRCFNLADIAINNDVEDERFSEVLFNKFIRYYALMLSPGCVQPTPQETYMHLAYSLSLRSTCISRQVGAVITDLEDRILSLGWNEVPEGQIGCGLKVKKDYTDKENPLFEMEIWDNVITAEDLAVWDDEDSICVKDILSRIEIKTKLKSVSLTPEERADVLKALRIKRLEYSRSLHAEENAILQVASRGGVGLKDGTIYVTTFPCELCSKKIYQVGISKIYYTEPYPNSISEKVILKDGIRNIKILQFEGVKSYSYFKLFKPGFDKKDAQMLEGRGI

SEQ ID NO: 117 - protein, 291 aa, synthetic construct
  REGION 1..291: note = pYY-BEM4.8; tr|A0A1G0PGF4|A0A1G0PGF4_9BACT polypeptide sequence
MKHNNQLRKEIEKLLGQNSIIKNDELKKLQKEYKIETDELLISFLPYAAEFAKVPISKYKVGAVVLGKSGNIYFGSNMEFEAGALSATVHAEQSAVNNAWLNGETGINKIAVTAAPCGYCRQFLNELTTAKQLHVLLKDKNLEAAKVFKLTELLPEAFGPRDLEIEGGLMKVENHKLKIENINDELINAALEAANKSYAPYSKNYSGVSIQLSDGTIFSGRYSENAAYNPSLLPFQSALAFMNMNTKKGSNNKIVDAVLVEAVSNISQKDAAGTLLNSISKTKLRYYKIKN

SEQ ID NO: 118 - protein, 398 aa, synthetic construct
  REGION 1..398: note = pYY-BEM4.9; tr|A0A0P4WGY5|A0A0P4WGY5_9EUCA polypeptide sequence
MEENSSATSQPKCASRTKQGGNDLSTDMSNLSVGETKRTDFLPWDDYFMAVAFLSAMRSKDPSSQVGACIVNADKKIVGIGYNGMPIGCSDDELPWNKESLDPLQTKYMYVCHAEMNAIMNKNSSDLAGCCVYVALFPCNECAKLVIQAGIREVVFFSDKHQQKPETVASKKMLNMAGVAYRQYTPSQSKIELNLSLKEQEKSEPTADITQSSERDQNSKRKDYLSWEEYFMAMAHLSALRSKDPITQVGACIVNSKKKIVGIGYNGMPLGCNDDLMPWGNSSSNKLETKYMYVCHAGVNAIMNKNSCDVSGCTLYVALFPCNECAKVIIQAGIKTIIYASDTNKDQASILASKKMLDMAGIKYRADNLSQRKIVIDFKTIDWNSRFMNDHQNDPTCL

SEQ ID NO: 119 - protein, 259 aa, synthetic construct
  REGION 1..259: note = pYY-BEM4.10; tr|A0A3D8IG27|A0A3D8IG27_9HELI polypeptide sequence
MRKNILYFILTLFFLSGLYATSLPEDNVVSGVIYEKIDTVSAEVDHIYPMLALAIVYKDWQEKNMLNKQGHNIGLVIVDENNMPVFWVRNSVHATHNGTQHGEVRLVSNLLNCEGFNKYLDKYTLYTTLEPCIMCAGMLSMVQIPKVVYAQKDLSCGNTQEIISTAKYPRYYKAFTVENGYKKDLEECFEQYKICKNDSITDFLVNDSAKEIFRKASNDLQDYKVKFKENRRVIKVAQEFLQNIQTKDNLDVLQCPKNM

SEQ ID NO: 120 - protein, 256 aa, synthetic construct
  REGION 1..256: note = pYY-BEM4.11; tr|A0A351C8C4|A0A351C8C4_9BACT polypeptide sequence
MNELTKQSEHLRNEALRIATRSYVPYTGQQEGVIILLENGDLIPGVRVENASFQLTIPALQNALSTMYALQRTDISMIVSSIPFTDSDLAYTGGMAEIAWEMVGASLLLVAGAHIPEAGTFIDPARGENLLDVSREAALNAFIPESDFPVGSAIQTSDDVVIDGCNVEHSDWSKIICAERNVLSTARSYGLGQITTIYVSCPKEPGGTPCGACRQVIVELAPDATVWMDRGNQEPIAMKATKLLPGHFTGNVLKKQ

SEQ ID NO: 121 - protein, 301 aa, synthetic construct
  REGION 1..301: note = pYY-BEM4.12; tr|A0A1G6V2K7|A0A1G6V2K7_PEPNI polypeptide sequence
MPIVRVNEIGARLPEDWEALETAIWQAYVSREDLPDAGELDLTLVDDATIQELNKTHRQLDKSTDVLSFPMYDDRDDLAADVQAGLPVILGDIMISVPTAERQAQAYGHSFKREMAYLLVHGLLHIAGYDHMSAEEKSAMRRAEEAILADVDVPRDTAPSKTAAVLDEADVQALIDAARAARLQAYAPYSGYAVGAALLAADGRRFCGVNVENASYGATCCAERTALFAAVTAGARDFIALALVTEGDEPAPPCGLCRQALAEFSPDLAIYLAGPTGETYRRTSLAALFPEAFSLSTKESV

SEQ ID NO: 122 - protein, 528 aa, synthetic construct
  REGION 1..528: note = pYY-BEM4.13; tr|F2NP91|F2NP91_MARHT polypeptide sequence
MPVMETHALEARFKEALARLCPEGRLLAAVSGGGDSVALLYLLKAAGRDTIVAHLDHALRPDSAADAAFVEKLAQRLGFPLETEHVDVRALAHRKRINLEAAAREVRYAFLARVARRWKARCILTAHTLDDNAETVLLQILRGAGRGLGIRPLQRRVARPLLEFSRAELRAYLEARGARWLEDPTNRSLELDRNYLRHAVLPRITARFPHALEALARFSQAQQADDWALEALSARHLIPDRRWPVPAYRALPLERAPEALRRRAIRGVLEALGVRPEARLVADVEAALGGRAQTLPGGVVVRRQRGTLFFIPPTVRFPKVQPPAGLEARPPRPGDYLVFPYGRKRLVDFLNERGVPRELKRRWPVGAVGAEVRWVYGLWPEPDEDRYMRRALVLARAAARQGEVPIGAVLVRDGAVLAEAANAVEASRDATAHAELLALRTALRRVGEKVLPGATLYVTLEPCPMCYGAILEARVARVVYGVENLKAGAFTVHGLEPRVALEAGRVEGECAKVLKDFFARLRPGRDGA

SEQ ID NO: 123 - protein, 226 aa, synthetic construct
  REGION 1..226: note = pYY-BEM4.14; tr|A0A316TX77|A0A316TX77_9BACT polypeptide sequence
MINGYTPYSGNQNTCYVKGESGTFYPGVRIENVSYPLTISSVQAAVCSCLANSDNPVEYYTGDHQPELLQVWADEYDMKPGGKLPDSPLKLFDPLVPSIPDIKKELDVLTEKSVTPNSGFPVSALLQTEKGYIRGVNIELSSWALGLCAERVAISRALTAGYTQFKSIHIYAPEADFVSPCGACRQVLLEVMPDADTELYHGDGTLSKHIVSDLLPFGFTSHKLKK

SEQ ID NO: 124 - protein, 321 aa, synthetic construct
  REGION 1..321: note = pYY-BEM4.15; tr|R6VYG3|R6VYG3_9FIRM polypeptide sequence
MIHKGTQTIETKRLILRAFTPDDAEAAFENWMSDPKVTEFLRWKTHADISDSRKIVNEWANGSADPEFYQWAIVPKDVNEPIGTISVVDRNDALGIFHIGYCIGSKWWHKGITSEAFSAVIHFLFEEVGANRIESQHDPENIHSGDVMKKCGLTFEGTLRQADFNNRGIVDACVYSILQSEWQNNTSVWQRLYNAALTVQNDRVVSPFIDAGGVAAALMTKKGNIYTGICIDTASTLGMCAERNAVANMLTNGESRIDKIVAVMPDGKVGAPCGACREYMMQLDRDSGDIEILLDLETEKTVRLKDLIPDWWGAERFGDTE

SEQ ID NO: 125 - protein, 229 aa, synthetic construct
  REGION 1..229: note = pYY-BEM4.16; tr|A0A3C1HZ18|A0A3C1HZ18_9BACI polypeptide sequence
MGDIMENWNELSEPWKRCFLQAWKAYCHGSIPIGAVLVDSEGEIFLEGRNRVHELTAPEGQLCDCRIAHAEMNVLVQVKTSDYEKLSGATIYSTMEPCIQCFGAIILSRIKNISFAAIDDKLAGATTLEDRHGFIKSRNLNIAGPFSHLGEIQIILRTDFLLRIFDSEYADPLIAAHEKDYPIGVALGRHYHRNNRLQVAKKETIPFGELFNEFSFDIKRAREGYTLGK

SEQ ID NO: 126 - protein, 205 aa, synthetic construct
  REGION 1..205: note = pYY-BEM4.17; tr|A0A1M6KV24|A0A1M6KV24_9BACT polypeptide sequence
MEASQQNILLKIEGKGPVAEINFTVTLPEWLVEQVQSGSTVFLTQKEKMRFVLELARKNVAQETGGPFAAAVFSLESGELVSAGVNVVVESRCSSAHAEVVALSLAQKAVDSHDLGAAGLPRMVLVSSAEPCAMCMGAIPWSGVKQVICGARDEDVRSVGFDEGAKPLEWVEDFAERGIEVIRDVLREEATEVLWDYRERGGEIY

SEQ ID NO: 127 - protein, 207 aa, synthetic construct
  REGION 1..207: note = pYY-BEM4.18; tr|A0A2U0T9B4|A0A2U0T9B4_9RHIZ polypeptide sequence
METAELISRLLDVIEKDIAPVTAKGVARGNKLFGAAILKKSDLAVIVAETNNEIENPLWHGEMQAIKRFFELPADQRPATRDCLFLATHEPCSLCLSGITWSGFDNFYYLFSHQDSRDGFAIPYDIQILKSVYAVPEPETGTVSPARDLYNRSNDFWTSHGLQDMIAGLARSNREALLARIDDLNALYAELSERYQRDKGGKGIPLP

SEQ ID NO: 128 - protein, 231 aa, synthetic construct
  REGION 1..231: note = pYY-BEM4.19; tr|A0A2K9PN08|A0A2K9PN08_9FLAO polypeptide sequence
MSDKKESKIKISKTSESIELDEIHSLLSYSIVQKFWENDDRNGRGYNVGVILVDENKNIVDWDINSVNKTENSTQHGEMRLISRYLDKDELYSLKGYTMYPTLEPCAMCAGMMTMTNVYRTVNGQMDYFYSKALERLSIDTRECGGYPPYPRTVISEISPSSISTRLDAEYKQYTNAGNKPIITKFLSTYKAKTIYDDAFNQFINFKCKFPENKTKYENAIKFYNSLPESI

SEQ ID NO: 129 - protein, 330 aa, synthetic construct
  REGION 1..330: note = pYY-BEM4.20; tr|F4PWM7|F4PWM7_CAVFA polypeptide sequence
MRFSLSLLFVILSVLLAGVLACKDPYNPETVDYGQCASATKANYEVRSDSKVLTPADLPADELAVHESRMRHIIDIARVNNKKFVSSIYFPNGTLACIGINTGKPNMIAHGEIVAIQNCTEIHGISMYTNYSIYTTGEPCSMCASAILWSRFKTVVWSTYNSDLYCKICMSNIPIDSSYIFSRAYGLGIEAPVAIGGVVKAEGDAWFGTYCNRPTSIYYIAPKCACQDPAKVSPLKFTQTRTTVWVEGGDKVVTQWNAIISNPSNSTIVDPPIVISPSVVFKGAPWGISAASEPNTYKLSYNKVLFPGQTFSFGYSVYGLEEVAFTALEA

SEQ ID NO: 130 - protein, 193 aa, synthetic construct
  REGION 1..193: note = pYY-BEM4.21; tr|U7QZM1|U7QZM1_PHOTE polypeptide sequence
MNKTRRKLLATLGIMSISMSFIAQAGEKKTQVINNILSKQEITEHEKYMREAIKEAIKNPKHPFGAVIVNRNNGEILSRGVNTGRNNPILHGEIQAINHYITQYGNQGWENVALYTTGEPCSMCMSALVWIGIREVIWATSISVIRNSGIRQIDISAHEIAERASSFYNPITLVGGILANETDKLFLERKRGN

SEQ ID NO: 131 - protein, 319 aa, synthetic construct
  REGION 1..319: note = pYY-BEM4.22; tr|A0A081CH48|A0A081CH48_PSEA2 polypeptide sequence
MASRRHLLATQVTGNHRKLSLWHLRGWLSPYTKLVDAVYFLTTNSFYHSLQTPPVQSITMLLSSIITSLALAAQASAYREGLHPEFQSGLSINSVPATDRDHWMRLANSAIYYPPVSHPCPQAPFGTAIVNTTSNELICAIANRVGSTGDPTQHGEITAIQHCTNVMRKKGLSPQEIIAAWKQLSLYTNAEPCTMCLSAIRWAGFKEVIYGTSVGTISENGRNQIYIPSNLVLEKSYSFGHATLMLGNILTHETDPFFQHQFNESAPCPVGCERTQVGEARVKTCEPVPNWQKLVRLEYSEDSRVGSEPVAHTPLHLEL

SEQ ID NO: 132 - protein, 203 aa, synthetic construct
  REGION 1..203: note = pYY-BEM4.23; tr|A0A3D3HMU1|A0A3D3HMU1_9GAMM polypeptide sequence
MDYSDAILGAITSIRRNSKQPGVNVTDNVTDSSTQYNNDEYWMRRALALAREAGEAGEIPVGAVLVKDNQQVAGGFNQPIRSHDPAAHAEILTLREAGAVLGNYRLIDTTLYVTLEPCMMCAGALVHSRIKRLVFGAAEPKTGAAGSFIDLLTLPRLNHYMEVTGGVLGEECSVLLSDFFRRRRAEKKALKRQNSESGSDSAS

SEQ ID NO: 133 - protein, 270 aa, synthetic construct
  REGION 1..270: note = pYY-BEM4.24; tr|A0A1N5WT13|A0A1N5WT13_9ACTN polypeptide sequence
MLEKIERRLVAAAEAVVRSPSTGDAHTVAAAAMDANGDIYSGVNVFHFTGGPCAELVVIGSAAAANAPPLITIVAVGDGDRGVIAPCGRCRQVMLDLHPDVFVIVPTGDGQLAAKPVRELLPFGYVARTGSTAPRVVYFHPRHYDTISSGLKTATVRFQDSVQTGPAVFVFDDGESIRRLDAVVEKVESRRLDHLTEEDAHHEALPDSDALRDAIKTQYPMLGDGDVVDVATFRLTAISAPDPDPRSSYPPAVSRCNPAGPRADLLVGQS

SEQ ID NO: 134 - protein, 257 aa, synthetic construct
  REGION 1..257: note = pYY-BEM4.25; tr|X0SAC5|X0SAC5_9ZZZZ polypeptide sequence
MTKDGRVIASAHDTEVTDQDSTAHAEINAIRKASKIYRKDLTGCLIISTHEPCPMCTGSIIWSNISKVVYGVSIRDSIKAGRDMINLSCKEIIKKPNAEINIYDGILKKECLKLYNNDTRKLVKKFRKYEWINIEENLLNKRMQWFENNKTMIRKLKGNDLEKAYHLILMKIGIKRSEAPIVKKSESKIIFHSKNYCPSLEACIILDLDTREVCKEIYERPTEELIRRLNSKLRFTRNYDCIRPYSDYCEEIIILEK

SEQ ID NO: 135 - protein, 154 aa, synthetic construct
  REGION 1..154: note = pYY-BEM4.26; tr|A0A3B8IC10|A0A3B8IC10_9BACT polypeptide sequence
MPSHEDFIHQCLELGKEALLQGNPPVGSVIVWQDQVIGRGIENGRSSGDITQHAELLALQEAVATGQRDKLKEAIIYSTHEPCVMCAYPIRQYKIPTVVYSVAVPELGGHTSSWHLLTTEDVPKWGKAPKIITGISAEEVEALNAAFQDSLKKG

SEQ ID NO: 136 - protein, 180 aa, synthetic construct
  REGION 1..180: note = pYY-BEM4.27; tr|A0A2N9P8B9|A0A2N9P8B9_9FLAO polypeptide sequence
MFIFKLISPPVSIEVYQDKIIQKLYICFMENIFTDEYFMKKALQEAETAFQQGEIPVGAVIVIDNRIIARSHNLTEMLNDVTAHAEMQAITASANFLGGKYLKDCTLYVTLEPCQMCAGALYWSQISKIVYGATDEQRGYRAMGAQLHPKTKVISGIMQNECTHLMKDFFKQRRSKSTKD

SEQ ID NO: 137 - protein, 178 aa, synthetic construct
  REGION 1..178: note = pYY-BEM4.28; tr|K1KX30|K1KX30_9BACT polypeptide sequence
MVKNPVNNNELYFGKHSEIPMNEEQKAYMKMAVDLSRSGMESGKGGPFGCVIVKDGKVIGIGSNSVLETNDPTAHAEIVAIRDACRNLGHFQLDGCEVYTSCEPCPMCLGAIYWARPSKVFFANDKRDAAEAGFDDDFIYQELELPYEKRKIPFEQGMQDTAKEVFQEWILKEDKTLY

SEQ ID NO: 138 - protein, 196 aa, synthetic construct
  REGION 1..196: note = pYY-BEM4.29; tr|R4XI84|R4XI84_TAPDE polypeptide sequence
MSSEIEPPSTDVHKHAVAEAADESGAADAFMQIALQQAETALLNKEVPVGCVFVHQPTGTVLATGANQTNASLNGTLHAEFVAIESILRDHPPSIFRESDLYVTVEPCVMCASALRQLQVRKVYFGCGNDRFGGCGSVFSIHSDASKTGDAAYMVESGIFRKEAIMLLRRFYLLQNESAPKPALKSTRVLKEHFDE

SEQ ID NO: 139 - protein, 212 aa, synthetic construct
  REGION 1..212: note = pYY-BEM4.30; tr|A0A239CVF7|A0A239CVF7_9DELT polypeptide sequence
MSPASKKHFPSLFSFLLLTIGLICGTAHAQPQGHTADDTAATLANASLKEHEPFIRRCYQLAIDAGKKGNHPFGALLVHKGKIVLEAENTVLTDNDFTNHAEMNLIAEAARTLSRQIIPEATVYTSCAPCAMCTATLAMAGFTRIVYGVSHDALNKRFGLKGKSVSCPALFKTMGMELEFVGPVLEKEGLRVFDFWPEKDPHAQMLKKQARK

SEQ ID NO: 140 - protein, 320 aa, synthetic construct
  REGION 1..320: note = pYY-BEM4.31; tr|A0A1Q3NME1|A0A1Q3NME1_9BACT polypeptide sequence
MTEFNYDWAKLAFSSKRPLTNLKATFIIAPREISEKRFTQLLKEYLPKGDILLGISKEDYVEGLEGQPQFAMLQQKTLQKLIDKVNDASAHKVYTLRYFQRELPAIIEKLTPPRVVGIHGSWHHSFHTLPIYYLLSEKRIPYQLVAAFSDEDEARAYEVATDKKIVRPTLEGSFDDTTVLQLTDEVAKSSYDYGFQTGAILAEKVNGVYQPVAAGFNKVVPYQTYALLNGASRETNFSPANDMNHYDTIHAEMQILVEAAKQGISLKDKTLFVNLMPCPSCARTLSQTELSEIVYRIDHSGGYAVDLLTKVGKDIRRIVY

SEQ ID NO: 141 - protein, 180 aa, synthetic construct
  REGION 1..180: note = pYY-BEM4.32; tr|A0A2G6N4N7|A0A2G6N4N7_9DELT polypeptide sequence
MKERTVSYSDRHFMAEALEMAESALTQGEFPVGCVIADGTAVVARGHRTGTTAGAVNEIDHAEINALRHLGLAGEHLDRTDLTIYSTMEPCLMCFAAIVLSGINRIVYAYEDVMGGGTGCDLTGLPPLYRDAPLTLVAGVRRRASLNLFRRFFTDPENGYWAGSLLSRYTLNQTKDSHRL

SEQ ID NO: 142 - protein, 156 aa, synthetic construct
  REGION 1..156: note = pYY-BEM4.33; tr|A0A0G0RBB8|A0A0G0RBB8_9BACT polypeptide sequence
MQSVQYNKLTHLQRRALDEAEQVLENSYNPYSHFYVGACLISEDEQLIAGTNFENAAYGSAICAERAAVLRANAMSIRRFRGIAIIARGEDFNTTEVTGPCGSCRQVLYEISQVSGCDLQVILATSKKDKIVITTIRELLPLAFGPLDLGVDIGKY

SEQ ID NO: 143 - protein, 217 aa, synthetic construct
  REGION 1..217: note = pYY-BEM4.34; tr|A0A327L2Q5|A0A327L2Q5_9RHIZ polypeptide sequence
MVTSRDGEDEAMMARCVALSRIAVGKGEYPFGAVVAREGRIVAEAINRTIRDGDVSRHAEVIALARAQKAIGRRELRECSLYSNVEPCAMCSYCIREAWVGRVVYALGSPVMGGVSKWNILRDDGLSGRMPQVFDAAPEVVSGVLVEQAQAAWRDWSPLAWEMITLRGLMTDPSARPECRTRAARPRSLWHHLVALIERPPRPYVDPTSAAEGHADL

SEQ ID NO: 144 - protein, 162 aa, synthetic construct
  REGION 1..162: note = pYY-BEM4.35; tr|S2DR30|S2DR30_9BACT polypeptide sequence
MKMKKKIEITVSLEVIQKSEWSKEDRSLIERAIHAVEHAHAPYSNFMVGTALLLDNGQIFSANNQENVSFPVGICAERAVLSYAMGNFPNNRPVKLAVVAKRRSDSTWATVTPCGLCRQTINEYEVKFGHPIEILMLNPGEEILKASGIDQLLPFRFNDLNS

SEQ ID NO: 145 - protein, 153 aa, synthetic construct
  REGION 1..153: note = pYY-BEM4.36; tr|A0A369QGF1|A0A369QGF1_9BACT polypeptide sequence
MEEHEKWMHWCLNLAQQALQQGDFPVGAVVVQKGKLIGQGVEAGQLKKDITCHAEMEAIRDARQTINTADLQNCILYSTHEPCIMCSYVIRHHKISRVVVGTTVPEVGGSSSAYPLLSAPDISIWVAPPHLVTGVLAEACQALSQAYKQKFKK

SEQ ID NO: 146 - protein, 159 aa, synthetic construct
  REGION 1..159: note = pYY-BEM4.37; tr|A0A1W6X4U4|A0A1W6X4U4_9RHIZ polypeptide sequence
MTNPSRQERWDRRFLELAKVFGTWSKDRSAGTGCVIVGPDRLLRASGYNGFARGIDDEVPERHERPAKYSWTEHAERNAIYNAAKLGISLDGCTAYVNWFPCIDCARAIVQAGIVRLVGLHPDHADQRWGSEFKFATEMLRESGIEIILYDIPELAARK

SEQ ID NO: 147 - protein, 490 aa, synthetic construct
  REGION 1..490: note = pYY-BEM4.38; tr|A0A238BW09|A0A238BW09_9BILA polypeptide sequence
MEEMARKIRTKAKKANSYCNTMTFLISKASIVLLKAECKRIELTVVIFRFLIKMNASEPNNELCDMTVIKSMLKITHVIFDLDGLLIDTEVVFSKVNQCLLSKYNKKFTPHLRGLVTGMPKKAAVTYILEHEKLSAKVDVDEYCKKYDEMAEEMLPKCSLMPGVMKLVRHLKTHSIPMAICTGATKKEFEIKTRYHKELLDLISLRVLSGDDPAVKRGKPAPDPFLVTMDRFKQKPEKAENVLVFEDAANGVCAAIAAGMNVIMVPDLTYMKIPEGLQNKINSFSDNLIISNDLNVALMSLKKELSEEEVHFLNRAFEIAVDAVLNNEVPVGCVFVFEGQEVAFGRNDVNRTKNPTYHAEMVALKMMKQWCMDNGRDLEEIMRRTTLYVTLEPCIMCASALYHLRLKKILYGAANERFGGLVSVGTREKYGAKHFIEIMPNLSVDRAVKLLKEFYEKQNPFCPEEKRKVKKPKKSGNNNDNSDDAVALNV

SEQ ID NO: 148 - protein, 159 aa, synthetic construct
  REGION 1..159: note = pYY-BEM4.39; tr|A0A1J5H6Z0|A0A1J5H6Z0_9BACT polypeptide sequence
MAYQPSEKFMQMAIDKTREGVLSGQTPFGACIVKDGKVVACEHNTVWQDTDITSHGEVHTIRAACKAIGSIDLSGCILYSTCEPCPMCFSAIHWARIDTVVYGAFIADAQDAGFNELTISNEKMKEFGGSPVNFISGFMRDENVALFKLWKEQGANNVY

SEQ ID NO: 149 - protein, 168 aa, synthetic construct
  REGION 1..168: note = pYY-BEM4.40; tr|A0A3C2D945|A0A3C2D945_9BACT polypeptide sequence
MKTTEIRIIVHEYQNIDELTENDQYLLHEARRITEFAYAPYSGFHVGAAILLGNGMIVKGNNQENSAYPSGLCAERVALFYANANYPDSEVKTIAISAAKNGILVNDPIKPCGGCRQTLSEAEVRFGSPIRIILDGQDSILVLHGVESLLPLSFSKKDLASPLAATGR

SEQ ID NO: 150 - protein, 214 aa, synthetic construct
  REGION 1..214: note = pYY-BEM4.41; tr|A0A1I7EYS3|A0A1I7EYS3_9BURK polypeptide sequence
MKFKLDPSRPPDEDDYYLGVALAVRRKANCTGNRVAAVIVKNKRVIATGYNGVPEDMPNCLDGGCLRCSNPGGQFKSGTRYDLCICVHAEQNALLTAARFGISVEGAHLYTTMQPCFGCAKEILQAKIEKVFYLHPWVPTDVDPVMDAAMKAEYAKIIGKLKVKKLDFDDPVATWAVTTMRQAALASDKNPDKKTPPKTAKKKVAKKKSRTSPR

SEQ ID NO: 151 - protein, 155 aa, synthetic construct
  REGION 1..155: note = pYY-BEM4.42; tr|H8GQX8|H8GQX8_METAL polypeptide sequence
MNHEHFMRRAIELARQAPQYPFGAVIVRRDDGQCVGQGFNRSDLNPTYHGEMVAINDCAVRHCAEDWRGFDLYTTAEPCAMCQGAIEWAGIGRVFYGTSIPYLQKLGWWQIDLRAAEVSARAVFRDTLIVGGILETECNALFAAARRGCFGTGSE

SEQ ID NO: 152 - protein, 156 aa, synthetic construct
  REGION 1..156: note = pYY-BEM4.43; tr|A0A0S8HZN3|A0A0S8HZN3_9CHLR polypeptide sequence
MDEHDIRFLRASFDVARNARKNGNHPFGALLVDEHGRIVMEAENTVITAKDCTGHAETNLMREASSKYDSDFLANCTIYTSTEPCPMCAGAIFWSNVRRVVYGLSEESLYEIAGRGSEEVLFLSCREIFERGKKLIEVIGPLLEDEAREVHMGFWR

SEQ ID NO: 153 - protein, 193 aa, synthetic construct
  REGION 1..193: note = pYY-BEM4.44; tr|E3SF31|E3SF31_9CAUD polypeptide sequence
MKPTTVLQIAYLVSQESKCCSWKVGAVIEKNGRIISTGYNGSPAGGVNCCEHAEEQGWLLNKPKPVLIPGHKSECVRFSQVDRFVLAKAHREAHSAWSKNNEIHAELNAILFAARMGSSIEGATMYVTLSPCPDCAKAISQSGIKKLVYCETYDKNIPGWDDILKNAGIEVFNVPKRSLDKLNWENINEFCGE

SEQ ID NO: 154 - protein, 330 aa, synthetic construct
  REGION 1..330: note = pYY-BEM4.45; tr|F8AAC6|F8AAC6_THEID polypeptide sequence
MIRAPWHEYFMLLAKIVALRSGCNSRPSGAVIVKNKRILATGYNGPMPGAWHCTDRGPGYCFRREKGIPDIDKYNFCRATHAEANAIAQAARFGISVEGASLYCTLAPCYVCLKLIASAGIKKVYYEHDYGSRDFERDQFWKEAIKEAGLEKFEQITVSQEVMEQLQEILPYPTSKRRLAPTEFLDEFEDGKKYGVPSIEVLFNKLNYLTRQALKDITFVIEKTTVTEEPEGISFYLSGKMVELSELINTVKKQINADQNFYFLAKHNAIEAKIEILREAENIRLKAFLNECPLESFKRIAESLDYILYQVSNSLSLPTRLELSVNLLRI

SEQ ID NO: 155 - protein, 158 aa, synthetic construct
  REGION 1..158: note = pYY-BEM4.46; tr|A0A2H4ZNK4|A0A2H4ZNK4_9EUKA polypeptide sequence
MKKQLSRKIQEEWMSRLLRNAYDAGTYGEVPIAAVILNESGQCIGWGRNCREKDQNPLGHAEIIALRQASYLKKSWRFNECTMLVTLEPCPMCAGALLQARINHIIYGASDYKRGGFGGVLDLSKNSSAHHKIEITRGVKSIQSCQLLETWFRRRRRV

SEQ ID NO: 156 - protein, 176 aa, synthetic construct
  REGION 1..176: note = pYY-BEM4.47; tr|A0A239N5N1|A0A239N5N1_9PSED polypeptide sequence
MEGRAGIIPFDEGGAAMGPAEEDSPMQHLAYMREALALARANVEAGGRPFGAVLVRDGEVIARAANGTHLDHDPTAHAELLALRAAGRALGSPRLDGCVVYASGHPCPMCLAAMHLSGVSAAYYAYSNADGEPYGLSTAAVYAQMAQPVEWQSLPLQALRPEDEEGLYGFWRERRP

SEQ ID NO: 157 - protein, 199 aa, synthetic construct
  REGION 1..199: note = pYY-BEM4.48; tr|A0A328VTR2|A0A328VTR2_9PSED polypeptide sequence
MHPEHLALLQQAPASTHADDTWARLCCEQALLAVEEGCYAVGALLVDGAGELLCSGRNQVFAPAYASAAHAEMRVLDQLEAEHAQVDRRSLTLYVSLEPCLMCYGRILLAGITRVRYLARDRDGGFALRHGRLPPAWANLASGLSVVQAKADPYWLDLAEHAIGRLQDRQTLRQRVIRAWRGQRTLTDEFSSTKRTHSG

SEQ ID NO: 158 - protein, 402 aa, synthetic construct
  REGION 1..402: note = pYY-BEM4.49; tr|A0A103YG48|A0A103YG48_CYNCS polypeptide sequence
YIRELHASSLRRDEHEIQNPKILVIVDRLSSPSLHVSLSLSLSLVIFPPFIPLNQTPTHMENAKVVEAKDGTIAVASAFSGHQEVVQDRDHKFLTRAVEEAYKGVECGDGGPFGAVVVHKDEVVASCHNMVLKHTDPTAHAEVTAIREACKKLNKIELSDCEIYASCEPCPMCFGAIHLSRIKRLIYGAKAEAAIAIGFDDFIADALRGTGFYQKAHLEIKQADGNGAMIAEQVFEKTKAKFAIDHKFLTRAVEEAYKGVECGDGRPFGALVVHKDEVVVSCHNMVLNYTDPTAHAEITAIREACKKLNRIELSDCEMYSSCEPCPMCFGAIQISRIKRLVYGAKAEASIASGIPIGDFISDALKGTGFHEKANFEIKQADGNGAMIAEQVFERTKAMFPKR

SEQ ID NO: 159 - protein, 195 aa, synthetic construct
  REGION 1..195: note = pYY-BEM4.50; tr|W5M1M8|W5M1M8_LEPOC polypeptide sequence
NSSTRESRVMAQMEINGGASPPKKPGKGQSAADQDMITGLINKALQAKEFAYCPYSNFRVGAALMTNDGRVFTGCNVENACYNLGVCAERTAILKAVSEGYESFRAIAVSSDLQDQFISPCGACRQVMREFGTGWDVFLTKVDGSYVRMTVDELLPMSFGPDDLKKKKVFSLQNGHEVSTQFYTHSPCEAGENNN

SEQ ID NO: 160 - protein, 134 aa, synthetic construct
  REGION 1..134: note = pYY-BEM4.51; tr|A0A3N5YPZ2|A0A3N5YPZ2_9ALTE polypeptide sequence
MSNSETEHIQALVDAAQAAQKQSYSPYSSFQVGAAIFADDGNTYSGCNIENVAYPLGQCAEATAIGMMIMQGAKRIEDIMIASPNDQVCPPCGGCRQKISEFGTAETKIHMVTRSGEVSTVTLGELLPLAFDSL

SEQ ID NO: 161 - protein, 162 aa, synthetic construct
  REGION 1..162: note = pYY-BEM4.52; tr|A0A2A9NC86|A0A2A9NC86_9AGAR polypeptide sequence
MTNSTLSNEDRTRLIQGAFQARKKTYSPYSNFPVGAALLTTDGRIIEGANIENASYGGTICAERTAIVKAVSDGYRHFAGIAVTTKMPTRVSPCGICRQVLREFCSLDMPVLLVPGDYPQRNPVDDDGADKPGVITEGGVRETTLGALLPDSFGPENLPPRA

SEQ ID NO: 162 - protein, 163 aa, synthetic construct
  REGION 1..163: note = pYY-BEM4.53; tr|A0A2D6RD43|A0A2D6RD43_9GAMM polypeptide sequence
MNIENLITENDETLIRRCIELAGESVKNGDKPFGALLAKDGNIIFESSNNAKTKVPYHAEILTLMDAQDKLNTTDLSDYALYSNCEPCPMCSFMIREYKLDKVVFSVHSPYMGGQSRWNILEDDVLTRFKPYFSKPPNVVGGVLESEGKRIFDKVGLWMFGKE

SEQ ID NO: 163 - protein, 204 aa, synthetic construct
  REGION 1..204: note = pYY-BEM4.54; tr|A0A0H3AVL6|A0A0H3AVL6_BRUO2 polypeptide sequence
MHAKGYSQQERRIIPFANRFRFRELCSNKSLHGLRAKFPEQYTKWDPMRKAASITKANSATPMDIALEEAHAAGERGEVPIGAVIVRDGEIIARAGNRTREFNDVTAHAEILTIRQAGEMLGSERLIDCDLYVTLEPCAMCAAAISFARIRRLYYGASDPKGGGIEHGGRFYTQPTCHHAPEIYPGFCEADARKILKDFFREKR

SEQ ID NO: 164 - protein, 165 aa, synthetic construct
  REGION 1..165: note = pYY-BEM4.55; tr|A0A242H531|A0A242H531_9ENTE polypeptide sequence
MFIVKNNIEVIQQQAELDAKFMKQALKLAKDASNNGNEPFGAVLVKNDKVILTGENQIHTESDPTYHAELGIIRDFCTSQKITDLSEYTLYTSCEPCCMCAGAMVWSNLDRMVYGLGHDELAEIAGFNIMIGSEEIFSKSPNRPEVAKGVLKEAAVPVYVDYFQR

SEQ ID NO: 165 - protein, 181 aa, synthetic construct
  REGION 1..181: note = pYY-BEM4.56; tr|A0A2R6XZE2|A0A2R6XZE2_9BACL polypeptide sequence
MSGRISWHEYFMAQAKLIALRATCTRLMVGAVIVRDRRVIAGGYNGSIAGDEHCIDVGCKVRDGHCIRTIHAEQNALMQCAKFGVSTDGAELYVTHFPCLNCTKLLIQAGIRHIYYEVPYRVDPYAIELLEKAGVGTTQITVDLNAYVQVMSKVSTDPALTYVPESKAQKDEYGQSVGKIV

SEQ ID NO: 166 - protein, 173 aa, synthetic construct
  REGION 1..173: note = pYY-BEM4.57; tr|A0A139SHT6|A0A139SHT6_9BACT polypeptide sequence
MSEANASSESLPSRNSPVELIAEAAGKFGRRPTWDEYFMATAVLISTRSSCERLNVGCVIVTAGESHKNRIVAAGYNGHLPGSPHTSRMRDGHEQATVHAEQNAISDAARRGSSVEGCTAYVTHYPCINCAKILASAGIAKICYRLDYHNDPLVKPMLAEAGIEIVQLGEAAS

SEQ ID NO: 167 - protein, 170 aa, synthetic construct
  REGION 1..170: note = pYY-BEM4.58; tr|A0A261DBH2|A0A261DBH2_9RICK polypeptide sequence
MVMKKKLITVKRSTEFNNFFMEEALKQAQFALDKNEIPVGAIIVNRITNKVIAKAHNIVEQTKNPVLHAEIVAINQSCQILSSKNLSDCDMYVTLEPCVMCSGAISFARIGRLFYAANDPKQGAIENGGRFFNSKSCFYRPEIYSGFSAKISENLIKEFFYNVRYQKCNP

SEQ ID NO: 168 - protein, 146 aa, synthetic construct
  REGION 1..146: note = pYY-BEM4.59; tr|A0A2N0XZK6|A0A2N0XZK6_9VIBR polypeptide sequence
MTDNSLHESYMRQAFELSKSALPGCRPNPPVGCVFVKDGEVVSSGFSQPPGNHHAEAGAIAAYTGSYDGLVAYVTLEPCSFQGRTPSCAKALVRVRPEKVYVAILDPDTRNSGAGIKILEDAGIDVEVGLLGEEVASFLNPYLIRN

SEQ ID NO: 169 - protein, 159 aa, synthetic construct
  REGION 1..159: note = pYY-BEM4.60; tr|A0A1V5R0F9|A0A1V5R0F9_9BACT polypeptide sequence
MTKKETTKLHALDDFCMKKALLLAKRAFRADEVPVGALVVDSSNKVIGRGYNQVEKRKSQRAHAEQLAIEQACKKIGDWRLEGCTLYVTLEPCTMCMGLIKLSRIERVVFGAASPLFGYQLDKNRKSQLYKKGVIKIRKGVGKATAAALLKDFFKNKRM

SEQ ID NO: 170 - protein, 167 aa, synthetic construct
  REGION 1..167: note = pYY-BEM4.61; tr|A0A2W0H8Y3|A0A2W0H8Y3_9BACI polypeptide sequence
MKNNGRLDHEYFMTEALQEAKEAGQRGDLPIGAVIVHNGRIIARGSNMRKTAGIKISHAENNAMHNCAPYLMKHASECVIYTTLEPCIMCLTTLVMANIDSIVFAADDKYMNMKPFIDANSYIRDRIHQYKGGVCRGESEALLRKYSPYAAELALNGTHPHHRKGGA

SEQ ID NO: 171 - protein, 165 aa, synthetic construct
  REGION 1..165: note = pYY-BEM4.62; tr|A0A261BDB7|A0A261BDB7_CAERE polypeptide sequence
LYKLYIFRMTTTKANLTQFEQELVDKAVGAMEKAYCKYSGFKVGAALVCEDGEIIIGANHENASYGATICAERSAMVTALTKGHRKFKLLAVATELEAPCSPCGICRQYLIEFGDYKVILGSSTSDQIIETTTYGLLPYAFTPKSLDDHEKEAEERNHQEGEKKH

SEQ ID NO: 172 - protein, 162 aa, synthetic construct
  REGION 1..162: note = pYY-BEM4.63; tr|A0A2E1PHI6|A0A2E1PHI6_9GAMM polypeptide sequence
MKELLIHSWLMLNSNSKLIMERVIELSEINLKNGKIPIAAVIVDKKNYEIISESQNEDSPIGHAELLAITKALKKLNTNRLDSTNLFVTIEPCPMCAYAISKCHINRLYFGSEDEKGGGVINGPRIFESHNLKKIDYVSHCYHEKTTQLMQSFFQLKRNQQL

SEQ ID NO: 173 - protein, 133 aa, synthetic construct
  REGION 1..133: note = pYY-BEM4.64; tr|A0A378LUA7|A0A378LUA7_9GAMM polypeptide sequence
MDTIIKKMISNAHNTLAHSYSPYSKFSVASCICTDKDNFYTGVNVENSAYGLAICAETSAISAMVTAGEKRIKSMVVMAGTNILCSPCGACRQRIYEFSTPDTLIHLCDKNSILRTFKINELLPEAFKFDFNP

SEQ ID NO: 174 - protein, 370 aa, synthetic construct
  REGION 1..370: note = pYY-BEM4.65; tr|A0A139HQ78|A0A139HQ78_9PEZI polypeptide sequence
MADSLKSKPGHARHDTALIHGLSQSDVQKLSESCVDAKSKAYCPYSHFRVGCAVLLANGDVVQGANVENAAYPVGTCAERVALGTAVGAKKGDFRALAVSTDISPPASPCGMCRQFIREFCELNTPILMYDKDGKSVVMTLEQLLPMSFGPDKLLPPGQLENGLMQTQTQSSFVTRAFSTTSSRRQDDTPQVPQSHYDFFPQTFPQGPPPKTSFSPDLKQLRKEFLQLQAKAHPDLAPQDQKRRAEALSMRINEAYKTLQSPLRRAQYLLSQQGIDVEDETAKLDDSSLLMEVMEAREAVEEVEDEEQLNEIRAENNGRIEESVRVLEDAFRDNEFEKAAQEAIRLRYWVNIEESIQGWEKGNGGGILHH

SEQ ID NO: 175 - protein, 165 aa, synthetic construct
  REGION 1..165: note = pYY-BEM4.66; tr|A0A2A9FXV0|A0A2A9FXV0_9VIBR polypeptide sequence
MCNLKENKDMDKYFHFACDATIEGMREGTGGPFGATLTRNGEVVCSVANTVLKDMDISGHAEMVAVREACKKLDTLDLSDCVMYATCEPCPMCVSVMLWAGIKTCYYASTHLDAAKHGFSDQQLRDYLDGSDTSTLNMVHIEDNRDDCAKIWTEFRHLNETKNDG

SEQ ID NO: 176 - protein, 509 aa, synthetic construct
  REGION 1..509: note = pYY-BEM4.67; tr|A0A1A8AG96|A0A1A8AG96_NOTFU polypeptide sequence
MEHSDRWSRAEPGLSTSSRETRDGSTQTDCKLQGHGPRLSKVNLFTLLSLWMELFPQEQDEENGQSQIRRSGLVVVREGKVVGLHCSGADLHAGQAAILQHGASLANCQLFFSRRPCATCLKMIINAGVRQITFWPGDPEISMLTSNQTHSQRTSQSITEASLDATAVEKLKSNSRPQICVLMQPLAPGVLQFVDETSRRSDFMERMMDDDPELDSEKLFNSDRLRHLKDFCRHFLIQTDQRHKDILSQMGLKNFCVEPYFSNLRSNMTELVEVLAAVAAGMPQQHYGFYREESLSLDPHPVDVSQAVARHCIVQARLLSYRTEDPKVGVGAVIWAKGQSACCCGTGRLYLIGCGYNAYPAGSKYAEYPQMDNKQEDRERRKYRYIVHAEQNALTFRTRDIKPDECSMLFVTKCPCDECIPLIRGAGVKHIYTSDQDRDKDKGDISYLRFGSLKGVCKFIWQRSPPVSSASSLHLTNGCVGKHVRQAEQQIYKNKKLCTKGSSGSSDIC

SEQ ID NO: 177 - protein, 148 aa, synthetic construct
  REGION 1..148: note = pYY-BEM4.68; tr|A0A3E2VN88|A0A3E2VN88_9FIRM polypeptide sequence
MEKEITNMDKQKLIQMAVDGLGRSYAPYSHFHVSAALLCADGTVYTGNNIENAAYTPSVCAERCAIFKAVGDGRREFEAIAVCGGPDGVIEDYCPPCGVCRQVMREFCDPSSFRVLVAKTAEDYREYTLEQLLPDGFGPDHLTGSGER

SEQ ID NO: 178 - protein, 221 aa, synthetic construct
  REGION 1..221: note = pYY-BEM4.69; tr|A0A2D5ZRJ2|A0A2D5ZRJ2_9BACT polypeptide sequence
MARPVHLHTGERRTEEGATESRAVAAVATAITRAPRAPPRPATGRERDGPPPRRVFGGGLRVGDPSGYDRGESKPIGGPLTEKRSDWHSYFMRIAGEVATRATCDRKHVGAVIVRNRTILSTGYNGSIRGMPHCDDVGHDMVDGHCIATIHAEANAILQAARNGVMIQDGSIYITASPCWNCFKLVANAGLKRVYYGEFYRDKRSFEVARRLGIDLMHIEV

SEQ ID NO: 179 - protein, 155 aa, synthetic construct
  REGION 1..155: note = pYY-BEM4.70; tr|A0A1B8WPS3|A0A1B8WPS3_9BACI polypeptide sequence
MEGVQLIYQFQWGNLIMTVNKEDLYLIDVARNTIKTLYVDGKHHVGAAVRTKTGKIYSAVHLEANIGRVSVCAEAIALGKAISEGESEFDTIVAVRHPDPTQENQKIEVVSPCGICRELISDYGKGTNVILKNKEGYIKTVISDLLPNKYIREDN

SEQ ID NO: 180 - protein, 156 aa, synthetic construct
  REGION 1..156: note = pYY-BEM4.71; tr|A0A1W5ZQK9|A0A1W5ZQK9_9BACI polypeptide sequence
MNRFMERAVSLAAENVRVGGQPFGAVLVKDDELVAEGVNEMHLNYDVSGHAELLAIRRAQGELQTHDLSGYTMYASGEPCPMCLSAMYFAGIKDVFYCATVEEAAQVGLEKSKNVYDDLQKSKGERSLVMKQMPLEDDQEDPMKLWDERTNHNGTS

SEQ ID NO: 181 - protein, 340 aa, synthetic construct
  REGION 1..340: note = pYY-BEM4.72; tr|A0A378V0W4|A0A378V0W4_MYCFO polypeptide sequence
MVHAQFDPTARQALAATAVEAKTRKDLTWQQIADAAELSPAFVTAAVLGQHALPARSAEAVAALLGLDDDAALLLQTIPIRGSIPGGIPTDPTIYRFYEMLQVYGTTLKALVHEQFGDGIISAINFKLDVRKVADPEGGERAVITLDGKYLPPNPFDRVRYRGGLMDFAQRTIDIARQNVAEGGRPFATVIVKNGEILAESPNLVAQTHDPTAHAEILAIRKACTRIGTEHLIGATIYVLAQPCPMCLGSLYYCSPDEVVFLTTRDAYEPHYVDDRKYFELNMFYDEFAKPWDQRRLPMRYEPRDAAVDVYKLWQERNGGERRVPGAPTSTRPGKNPRGE

SEQ ID NO: 182 - protein, 157 aa, synthetic construct
  REGION 1..157: note = pYY-BEM4.73; tr|I3XF03|I3XF03_RHIFR polypeptide sequence
MKQRCMSPKSAQRFWDNDMHNNKDRPMSENELFVAAREAMAKAHAPYSKFPVGAAIRAEDGQIYTGANIENLSFPEGWCAETTAISHMVMAGQRKIMEVAVIAEKLALCPPCGGCRQRLAEFSGASTRIYLCDETGIKKSLALSDLLPHSFETEILG

SEQ ID NO: 183 - protein, 595 aa, synthetic construct
  REGION 1..595: note = pYY-BEM4.74; tr|F8IEF3|F8IEF3_ALIAT polypeptide sequence
MDAKELETRGWLCMRAVDVIDKKRRGEALAEEELRFLIEGYVAGRIPDYQMSAFLMAVVWRGMTREETLVLTRLLADSGERLDLSGIPGVKVDKHSTGGVGDKATLVVLPLVASIGVPVIKMSGRGLGHTGGTIDKLESIPGFRTDLSVAELVAQVRQVGIALGGQTADLAPADKKLYALRDVTGTVESLPLIASSVMSKKLAGGADAIVLDVKVGDGAFMKSRSDARRLARLMVEIGEAAGRRTVAVLSNMDQPLGCAIGNALEVAEAIRVLSGEGPFDLAEIALALAEEMTVLAGVAATREEARRMLRQSVAEGRALETLRRWIAAQGGDPAVVDDPSRLPQAPVQMPYLPKKAGFVAKLSALAFGLAAMRLGAGRETKEEAIDPSVGIVLHAKVGDRVQTHRPMFTVHARTGEDALRCIQELEAAIQISDDPVEAPPLILARIDRSEALPYADLMDAAREARDRAYVPYSGFAVGAALELADGRMVTGANVENASYGLTNCAERSAVFRAVAEGGPGTKPEIRAVAVIADSPEPVSPCGACRQVLAEFCSPDTPVYLGNLQGDVRETTVGALLPGAFTDAQMANVRRQDKEA

SEQ ID NO: 184 - protein, 153 aa, synthetic construct
  REGION 1..153: note = pYY-BEM4.75; tr|A0A1G3M638|A0A1G3M638_9SPIR polypeptide sequence
MKTTNINALDKWDLRFLQMAEHVAEWSKDPSTKVGAVIVRPDRTIASVGFNGFARGVRDTVERLWNRELKYPLTVHAELNAILSAHEPVRGHSLYVSPLSPCSNCAGVIIQSGIARVVAKCGQVNNPAQWSESFNLALTAFAEAGVSVILVEH

SEQ ID NO: 185 - protein, 177 aa, synthetic construct
  REGION 1..177: note = pYY-BEM4.76; tr|A0A3D9LFR2|A0A3D9LFR2_9MICC polypeptide sequence
MEQNDHGSSGAFSDPFEDDIPLTASLPRITGTGSGIDWQRLESTARAAMTRAYVPYSRFPVGAAALVEDGRVVAGCNIENASLGLTLCAECSLVSNLQMSGGGRIVAFYCVDGNGEVLMPCGRCRQLLYEFHAPGMRLMGPDGELTMDEVLPLAFGPADMTHLSDSAASTDDPGRTR

SEQ ID NO: 186 - protein, 172 aa, synthetic construct
  REGION 1..172: note = pYY-BEM4.77; tr|A0A3B9YGB5|A0A3B9YGB5_9BACT polypeptide sequence
MAKPISKKYRKLIETAKAARKKAYSPYSRYQVGAAVLTESGRIYSGANMENASYGLCMCAERVAIANAVTRGEKVLQAVCVVGKKARPCGACRQVMLEFSTKETELLMVDIDPNARRDTVIRTRVYSMLPNPFDPFESGMLPQHPQNLLRRRKSPQPRRKRRSRPVHREVSR

SEQ ID NO: 187 - protein, 391 aa, synthetic construct
  REGION 1..391: note = pYY-BEM4.78; tr|A0A182F569|A0A182F569_ANOAL polypeptide sequence
MPRPSQFRVSSSQSLSNSQIQASQSSDSVVDITSYVNAVVKALLNLSCTKTIIKRADLVNIALKGNGRLIGRVLQDANIELKEIYGYELIEVEKSKTMILCSTLAAGSMDELNDANRRRYTFLYLILGYIFMKNGSVPETIVWEFLETLGIEEQQEHNYFGDVRKLYDSLFKQAYLTRTKQALEGLNDDVMLISWGVRSKHEVSKKDILAGFCKVMNRDPVDFKAQYIEANEKDDKMNNNINGTVDGRNTVEYSSLDASVKELIEAAIKVRNNAYCPYSNFAVGAALRTVGGDIVTGCNVENGTFGPSVCAERTAVCKAVSEGHREFTAVAVVAFQETEFTAPCGTCRQTLSEFSRKDIPIYLVKPSPVRVMVTSLFQLLPHAFSPSFLNK

SEQ ID NO: 188 - protein, 151 aa, synthetic construct
  REGION 1..151: note = pYY-BEM4.79; tr|A0A264Z0D4|A0A264Z0D4_9BACI polypeptide sequence
MEPKKLIEEAIVASKQAYVQYSNFHVGAALLTKDGKLYHGCNIENASYGLTNCAERTAIFKAVSEGEKEFQAIAVVGDTEGPISPCGACRQVLAEFFSPDTVVILANLKGDHVVTNINELLPGFFSSKDLQKKVKNCFEKNALGSSCLRPI

SEQ ID NO: 189 - protein, 229 aa, synthetic construct
  REGION 1..229: note = pYY-BEM4.80; tr|A0A1L9Q1R3|A0A1L9Q1R3_ASPVE polypeptide sequence
MPLSAEEAALVETATATINSIPLSEDYSVASAAKASDGRVFTGVNVYHFTGGPCAELVVLGVAAAAGAAQLTHIVAVANEQRGILSPCGRCRQVLLDLQPNIQVIVGKEGSEQSVPVAQLLPFSYRQPDQHTPVIFKALTSSGPVVVDFFATWCGPCKAVAPVVGKLSETYTDVRFIQVDVDKARSISQEHDIRAMPTFVLYKDGKLLDKRVVGGNMKELEEQIKAIIA

SEQ ID NO: 190 - protein, 18 aa, synthetic construct
  REGION 1..18: note = synthetic peptide
KRTADGSEFESPKKKRKV

SEQ ID NO: 191 - protein, 16 aa, synthetic construct
  REGION 1..16: note = synthetic peptide
KRPAATKKAGQAKKKK

SEQ ID NO: 192 - protein, 17 aa, synthetic construct
  REGION 1..17: note = synthetic peptide
KKTELQTTNAENKTKKL

SEQ ID NO: 193 - protein, 19 aa, synthetic construct
  REGION 1..19: note = synthetic peptide
KRGINDRNFWRGENGRKTR

SEQ ID NO: 194 - protein, 16 aa, synthetic construct
  REGION 1..16: note = synthetic peptide
RKSGKIAAIVVKRPRK

SEQ ID NO: 195 - protein, 7 aa, synthetic construct
  REGION 1..7: note = synthetic peptide
PKKKRKV

SEQ ID NO: 196 - protein, 30 aa, synthetic construct
  REGION 1..30: note = synthetic polypeptide
MDSLLMNRRKFLYQFKNVRWAKGRRETYLC

SEQ ID NO: 197 - protein, 1368 aa, Streptococcus pyogenes [sequence omitted]

SEQ ID NO: 198 - DNA, 4104 bp, Streptococcus pyogenes
  misc_feature 1..4104: note = wild type spCas9 polynucleotide sequence
  source 1..4104: mol_type = genomic DNA
atggataagaaatactcaataggcttagatatcggcacaaatagcgtcggatgggcggtgatcactgatgattataaggttccgtctaaaaagttcaaggttctgggaaatacagaccgccacagtatcaaaaaaaatcttataggggctcttttatttggcagtggagagacagcggaagcgactcgtctcaaacggacagctcgtagaaggtatacacgtcggaagaatcgtatttgttatctacaggagattttttcaaatgagatggcgaaagtagatgatagtttctttcatcgacttgaagagtcttttttggtggaagaagacaagaagcatgaacgtcatcctatttttggaaatatagtagatgaagttgcttatcatgagaaatatccaactatctatcatctgcgaaaaaaattggcagattctactgataaagcggatttgcgcttaatctatttggccttagcgcatatgattaagtttcgtggtcattttttgattgagggagatttaaatcctgataatagtgatgtggacaaactatttatccagttggtacaaatctacaatcaattatttgaagaaaaccctattaacgcaagtagagtagatgctaaagcgattctttctgcacgattgagtaaatcaagacgattagaaaatctcattgctcagctccccggtgagaagagaaatggcttgtttgggaatctcattgctttgtcattgggattgacccctaattttaaatcaaattttgatttggcagaagatgctaaattacagctttcaaaagatacttacgatgatgatttagataatttattggcgcaaattggagatcaatatgctgatttgtttttggcagctaagaatttatcagatgctattttactttcagatatcctaagagtaaatagtgaaataactaaggctcccctatcagcttcaatgattaagcgctacgatgaacatcatcaagacttgactcttttaaaagctttagttcgacaacaacttccagaaaagtataaagaaatcttttttgatcaatcaaaaaacggatatgcaggttatattgatgggggagctagccaagaagaattttataaatttatcaaaccaattttagaaaaaatggatggtactgaggaattattggtgaaactaaatcgtgaagatttgctgcgcaagcaacggacctttgacaacggctctattccccatcaaattcacttgggtgagctgcatgctattttgagaagacaagaagacttttatccatttttaaaagacaatcgtgagaagattgaaaaaatcttgacttttcgaattccttattatgttggtccattggcgcgtggcaatagtcgttttgcatggatgactcggaagtctgaagaaacaattaccccatggaattttgaagaagttgtcgataaaggtgcttcagctcaatcatttattgaacgcatgacaaactttgataaaaatcttccaaatgaaaaagtactaccaaaacatagtttgctttatgagtattttacggtttataacgaattgacaaaggtcaaatatgttactgagggaatgcgaaaaccagcatttctttcaggtgaacagaagaaagccattgttgatttactcttcaaaacaaatcgaaaagtaaccgttaagcaattaaaagaagattatttcaaaaaaatagaatgttttgatagtgttgaaatttcaggagttgaagatagatttaatgcttcattaggcgcctaccatgatttgctaaaaattattaaagataaagattttttggataatgaagaaaatgaagatatcttagaggatattgttttaacattgaccttatttgaagatagggggatgattgaggaaagacttaaaacatatgctcacctctttgatgataaggtgatgaaacagcttaaacgtcgccgttatactggttggggacgtttgtctcgaaaattgattaatggtattagggataagcaatctggcaaaacaatattagattttttgaaatcagatggttttgccaatcgcaattttatgcagctgatccatgatgatagtttgacatttaaagaagatattcaaaaagcacaggtgtctggacaaggccatagtttacatgaacagattgctaacttagctggcagtcctgctattaaaaaaggtattttacagactgtaaaaattgttgatgaactggtcaaagtaatggggcataagccagaaaatatcgttattgaaatggcacgtgaaaatcagacaactcaaaagggccagaaaaattcgcgagagcgtatgaaacgaatcgaagaaggtatcaaagaattaggaagtcagattcttaaagagcatcctgttgaaaatactcaattgcaaaatgaaaagctctatctctattatctacaaaatggaagagacatgtatgtggaccaagaattagatattaatcgtttaagtgattatgatgtcgatcacattgttccacaaagtttcattaaagacgattcaatagacaataaggtactaacgcgttctgataaaaatcgtggtaaatcggataacgttccaagtgaagaagtagtcaaaaagatgaaaaactattggagacaacttctaaacgccaagttaatcactcaacgtaagtttgataatttaacgaaagctgaacgtggaggtttgagtgaacttgataaagctggttttatcaaacgccaattggttgaaactcgccaaatcactaagcatgtggcacaaattttggatagtcgcatgaatactaaatacgatgaaaatgataaacttattcgagaggttaaagtgattaccttaaaatctaaattagtttctgacttccgaaaagatttccaattctataaagtacgtgagattaacaattaccatcatgcccatgatgcgtatctaaatgccgtcgttggaactgctttgattaagaaatatccaaaacttgaatcggagtttgtctatggtgattataaagtttatgatgttcgtaaaatgattgctaagtctgagcaagaaataggcaaagcaaccgcaaaatatttcttttactctaatatcatgaacttcttcaaaacagaaattacacttgcaaatggagagattcgcaaacgccctctaatcgaaactaatggggaaactggagaaattgtctgggataaagggcgagattttgccacagtgcgcaaagtattgtccatgccccaagtcaatattgtcaagaaaacagaagtacagacaggcggattctccaaggagtcaattttaccaaaaagaaattcggacaagcttattgctcgtaaaaaagactgggatccaaaaaaatatggtggttttgatagtccaacggtagcttattcagtcctagtggttgctaaggtggaaaaagggaaatcgaagaagttaaaatccgttaaagagttactagggatcacaattatggaaagaagttcctttgaaaaaaatccgattgactttttagaagctaaaggatataaggaagttaaaaaagacttaatcattaaactacctaaatatagtctttttgagttagaaaacggtcgtaaacggatgctggctagtgccggagaattacaaaaaggaaatgagctggctctgccaagcaaatatgtgaattttttatatttagctagtcattatgaaaagttgaagggtagtccagaagataacgaacaaaaacaattgtttgtggagcagcataagcattatttagatgagattattgagcaaatcagtgaattttctaagcgtgttattttagcagatgccaatttagataaagttcttagtgcatataacaaacatagagacaaaccaatacgtgaacaagcagaaaatattattcatttatttacgttgacgaatcttggagctcccgctgcttttaaatattttgatacaacaattgatcgtaaacgatatacgtctacaaaagaagttttagatgccactcttatccatcaatccatcactggtctttatgaaacacgcattgatttgagtcagctaggaggtgactga

SEQ ID NO: 199 - protein, 1367 aa, Streptococcus pyogenes
  REGION 1..1367: note = MISC_FEATURE - spCas9 polypeptide sequence
MDKKYSIGLDIGTNSVGWAVITDDYKVPSKKFKVLGNTDRHSIKKNLIGALLFGSGETAEATRLKRTARRRYTRRKNRICYLQEIFSNEMAKVDDSFFHRLEESFLVEEDKKHERHPIFGNIVDEVAYHEKYPTIYHLRKKLADSTDKADLRLIYLALAHMIKFRGHFLIEGDLNPDNSDVDKLFIQLVQIYNQLFEENPINASRVDAKAILSARLSKSRRLENLIAQLPGEKRNGLFGNLIALSLGLTPNFKSNFDLAEDAKLQLSKDTYDDDLDNLLAQIGDQYADLFLAAKNLSDAILLSDILRVNSEITKAPLSASMIKRYDEHHQDLTLLKALVRQQLPEKYKEIFFDQSKNGYAGYIDGGASQEEFYKFIKPILEKMDGTEELLVKLNREDLLRKQRTFDNGSIPHQIHLGELHAILRRQEDFYPFLKDNREKIEKILTFRIPYYVGPLARGNSRFAWMTRKSEETITPWNFEEVVDKGASAQSFIERMTNFDKNLPNEKVLPKHSLLYEYFTVYNELTKVKYVTEGMRKPAFLSGEQKKAIVDLLFKTNRKVTVKQLKEDYFKKIECFDSVEISGVEDRFNASLGAYHDLLKIIKDKDFLDNEENEDILEDIVLTLTLFEDRGMIEERLKTYAHLFDDKVMKQLKRRRYTGWGRLSRKLINGIRDKQSGKTILDFLKSDGFANRNFMQLIHDDSLTFKEDIQKAQVSGQGHSLHEQIANLAGSPAIKKGILQTVKIVDELVKVMGHKPENIVIEMARENQTTQKGQKNSRERMKRIEEGIKELGSQILKEHPVENTQLQNEKLYLYYLQNGRDMYVDQELDINRLSDYDVDHIVPQSFIKDDSIDNKVLTRSDKNRGKSDNVPSEEVVKKMKNYWRQLLNAKLITQRKFDNLTKAERGGLSELDKAGFIKRQLVETRQITKHVAQILDSRMNTKYDENDKLIREVKVITLKSKLVSDFRKDFQFYKVREINNYHHAHDAYLNAVVGTALIKKYPKLESEFVYGDYKVYDVRKMIAKSEQEIGKATAKYFFYSNIMNFFKTEITLANGEIRKRPLIETNGETGEIVWDKGRDFATVRKVLSMPQVNIVKKTEVQTGGFSKESILPKRNSDKLIARKKDWDPKKYGGFDSPTVAYSVLVVAKVEKGKSKKLKSVKELLGITIMERSSFEKNPIDFLEAKGYKEVKKDLIIKLPKYSLFELENGRKRMLASAGELQKGNELALPSKYVNFLYLASHYEKLKGSPEDNEQKQLFVEQHKHYLDEIIEQISEFSKRVILADANLDKVLSAYNKHRDKPIREQAENIIHLFTLTNLGAPAAFKYFDTTIDRKRYTSTKEVLDATLIHQSITGLYETRIDLSQLGGD

SEQ ID NO: 200 - DNA, 4212 bp, synthetic construct
  misc_feature 1..4212: note = wild-type Cas9 polynucleotide sequence
  misc_feature 5..58: note = RuvC domain
  misc_feature 718..764: note = RuvC domain
  misc_feature 772..901: note = HNH domain
  misc_feature 906..1101: note = RuvC domain
  source 1..4212: mol_type = other DNA
atggataaaaagtattctattggtttagacatcggcactaattccgttggatgggctgtcataaccgatgaatacaaagtaccttcaaagaaatttaaggtgttggggaacacagaccgtcattcgattaaaaagaatcttatcggtgccctcctattcgatagtggcgaaacggcagaggcgactcgcctgaaacgaaccgctcggagaaggtatacacgtcgcaagaaccgaatatgttacttacaagaaatttttagcaatgagatggccaaagttgacgattctttctttcaccgtttggaagagtccttccttgtcgaagaggacaagaaacatgaacggcaccccatctttggaaacatagtagatgaggtggcatatcatgaaaagtacccaacgatttatcacctcagaaaaaagctagttgactcaactgataaagcggacctgaggttaatctacttggctcttgcccatatgataaagttccgtgggcactttctcattgagggtgatctaaatccggacaactcggatgtcgacaaactgttcatccagttagtacaaacctataatcagttgtttgaagagaaccctataaatgcaagtggcgtggatgcgaaggctattcttagcgcccgcctctctaaatcccgacggctagaaaacctgatcgcacaattacccggagagaagaaaaatgggttgttcggtaaccttatagcgctctcactaggcctgacaccaaattttaagtcgaacttcgacttagctgaagatgccaaattgcagcttagtaaggacacgtacgatgacgatctcgacaatctactggcacaaattggagatcagtatgcggacttatttttggctgccaaaaaccttagcgatgcaatcctcctatctgacatactgagagttaatactgagattaccaaggcgccgttatccgcttcaatgatcaaaaggtacgatgaacatcaccaagacttgacacttctcaaggccctagtccgtcagcaactgcctgagaaatataaggaaatattctttgatcagtcgaaaaacgggtacgcaggttatattgacggcggagcgagtcaagaggaattctacaagtttatcaaacccatattagagaagatggatgggacggaagagttgcttgtaaaactcaatcgcgaagatctactgcgaaagcagcggactttcgacaacggtagcattccacatcaaatccacttaggcgaattgcatgctatacttagaaggcaggaggatttttatccgttcctcaaagacaatcgtgaaaagattgagaaaatcctaacctttcgcataccttactatgtgggacccctggcccgagggaactctcggttcgcatggatgacaagaaagtccgaagaaacgattactccatggaattttgaggaagttgtcgataaaggtgcgtcagctcaatcgttcatcgagaggatgaccaactttgacaagaatttaccgaacgaaaaagtattgcctaagcacagtttactttacgagtatttcacagtgtacaatgaactcacgaaagttaagtatgtcactgagggcatgcgtaaacccgcctttctaagcggagaacagaagaaagcaatagtagatctgttattcaagaccaaccgcaaagtgacagttaagcaattgaaagaggactactttaagaaaattgaatgcttcgattctgtcgagatctccggggtagaagatcgatttaatgcgtcacttggtacgtatcatgacctcctaaagataattaaagataaggacttcctggataacgaagagaatgaagatatcttagaagatatagtgttgactcttaccctctttgaagatcgggaaatgattgaggaaagactaaaaacatacgctcacctgttcgacgataaggttatgaaacagttaaagaggcgtcgctatacgggctggggacgattgtcgcggaaacttatcaacgggataagagacaagcaaagtggtaaaactattctcgattttctaaagagcgacggcttcgccaataggaactttatgcagctgatccatgatgactctttaaccttcaaagaggatatacaaaaggcacaggtttccggacaaggggactcattgcacgaacatattgcgaatcttgctggttcgccagccatcaaaaagggcatactccagacagtcaaagtagtggatgagctagttaaggtcatgggacgtcacaaaccggaaaacattgtaatcgagatggcacgcgaaaatcaaacgactcagaaggggcaaaaaaacagtcgagagcggatgaagagaatagaagagggtattaaagaactgggcagccagatcttaaaggagcatcctgtggaaaatacccaattgcagaacgagaaactttacctctattacctacaaaatggaagggacatgtatgttgatcaggaactggacataaaccgtttatctgattacgacgtcgatcacattgtaccccaatcctttttgaaggacgattcaatcgacaataaagtgcttacacgctcggataagaaccgagggaaaagtgacaatgttccaagcgaggaagtcgtaaagaaaatgaagaactattggcggcagctcctaaatgcgaaactgataacgcaaagaaagttcgataacttaactaaagctgagaggggtggcttgtctgaacttgacaaggccggatttattaaacgtcagctcgtggaaacccgccaaatcacaaagcatgttgcacagatactagattcccgaatgaatacgaaatacgacgagaacgataagctgattcgggaagtcaaagtaatcactttaaagtcaaaattggtgtcggacttcagaaaggattttcaattctataaagttagggagataaataactaccaccatgcgcacgacgcttatcttaatgccgtcgtagggaccgcactcattaagaaatacccgaagctagaaagtgagtttgtgtatggtgattacaaagtttatgacgtccgtaagatgatcgcgaaaagcgaacaggagataggcaaggctacagccaaatacttcttttattctaacattatgaatttctttaagacggaaatcactctggcaaacggagagatacgcaaacgacctttaattgaaaccaatggggagacaggtgaaatcgtatgggataagggccgggacttcgcgacggtgagaaaagttttgtccatgccccaagtcaacatagtaaagaaaactgaggtgcagaccggagggttttcaaaggaatcgattcttccaaaaaggaatagtgataagctcatcgctcgtaaaaaggactgggacccgaaaaagtacggtggcttcgatagccctacagttgcctattctgtcctagtagtggcaaaagttgagaagggaaaatccaagaaactgaagtcagtcaaagaattattggggataacgattatggagcgctcgtcttttgaaaagaaccccatcgacttccttgaggcgaaaggttacaaggaagtaaaaaaggatctcataattaaactaccaaagtatagtctgtttgagttagaaaatggccgaaaacggatgttggctagcgccggagagcttcaaaaggggaacgaactcgcactaccgtctaaatacgtgaatttcctgtatttagcgtcccattacgagaagttgaaaggttcacctgaagataacgaacagaagcaactttttgttgagcagcacaaacattatctcgacgaaatcatagagcaaatttcggaattcagtaagagagtcatcctagctgatgccaatctggacaaagtattaagcgcatacaacaagcacagggataaacccatacgtgagcaggcggaaaatattatccatttgtttactcttaccaacctcggcgctccagccgcattcaagtattttgacacaacgatagatcgcaaacgatacacttctaccaaggaggtgctagacgcgacactgattcaccaatccatcacgggattatatgaaactcggatagatttgtcacagcttgggggtgacggatcccccaagaagaagaggaaagtctcgagcgactacaaagaccatgacggtgattataaagatcatgacatcgattacaaggatgacgatgacaaggctgcagga

SEQ ID NO: 201 - protein, 1368 aa, synthetic construct
  REGION 1..1368: note = exemplary catalytically active Cas9 nickase (nCas9) polypeptide sequence
MDKKYSIGLAIGTNSVGWAVITDEYKVPSKKFKVLGNTDRHSIKKNLIGALLFDSGETAEATRLKRTARRRYTRRKNRICYLQEIFSNEMAKVDDSFFHRLEESFLVEEDKKHERHPIFGNIVDEVAYHEKYPTIYHLRKKLVDSTDKADLRLIYLALAHMIKFRGHFLIEGDLNPDNSDVDKLFIQLVQTYNQLFEENPINASGVDAKAILSARLSKSRRLENLIAQLPGEKKNGLFGNLIALSLGLTPNFKSNFDLAEDAKLQLSKDTYDDDLDNLLAQIGDQYADLFLAAKNLSDAILLSDILRVNTEITKAPLSASMIKRYDEHHQDLTLLKALVRQQLPEKYKEIFFDQSKNGYAGYIDGGASQEEFYKFIKPILEKMDGTEELLVKLNREDLLRKQRTFDNGSIPHQIHLGELHAILRRQEDFYPFLKDNREKIEKILTFRIPYYVGPLARGNSRFAWMTRKSEETITPWNFEEVVDKGASAQSFIERMTNFDKNLPNEKVLPKHSLLYEYFTVYNELTKVKYVTEGMRKPAFLSGEQKKAIVDLLFKTNRKVTVKQLKEDYFKKIECFDSVEISGVEDRFNASLGTYHDLLKIIKDKDFLDNEENEDILEDIVLTLTLFEDREMIEERLKTYAHLFDDKVMKQLKRRRYTGWGRLSRKLINGIRDKQSGKTILDFLKSDGFANRNFMQLIHDDSLTFKEDIQKAQVSGQGDSLHEHIANLAGSPAIKKGILQTVKVVDELVKVMGRHKPENIVIEMARENQTTQKGQKNSRERMKRIEEGIKELGSQILKEHPVENTQLQNEKLYLYYLQNGRDMYVDQELDINRLSDYDVDHIVPQSFLKDDSIDNKVLTRSDKNRGKSDNVPSEEVVKKMKNYWRQLLNAKLITQRKFDNLTKAERGGLSELDKAGFIKRQLVETRQITKHVAQILDSRMNTKYDENDKLIREVKVITLKSKLVSDFRKDFQFYKVREINNYHHAHDAYLNAVVGTALIKKYPKLESEFVYGDYKVYDVRKMIAKSEQEIGKATAKYFFYSNIMNFFKTEITLANGEIRKRPLIETNGETGEIVWDKGRDFATVRKVLSMPQVNIVKKTEVQTGGFSKESILPKRNSDKLIARKKDWDPKKYGGFDSPTVAYSVLVVAKVEKGKSKKLKSVKELLGITIMERSSFEKNPIDFLEAKGYKEVKKDLIIKLPKYSLFELENGRKRMLASAGELQKGNELALPSKYVNFLYLASHYEKLKGSPEDNEQKQLFVEQHKHYLDEIIEQISEFSKRVILADANLDKVLSAYNKHRDKPIREQAENIIHLFTLTNLGAPAAFKYFDTTIDRKRYTSTKEVLDATLIHQSITGLYETRIDLSQLGGD

SEQ ID NO: 202 - DNA, 4107 bp, Streptococcus pyogenes
  misc_feature 1..4107: note = Cas9 from Streptococcus pyogenes (NCBI Ref. Seq.: NC_002737.2)polynucleotide sequence
  source 1..4107: mol_type = genomic DNA
atggataagaaatactcaataggcttagatatcggcacaaatagcgtcggatgggcggtgatcactgatgaatataaggttccgtctaaaaagttcaaggttctgggaaatacagaccgccacagtatcaaaaaaaatcttataggggctcttttatttgacagtggagagacagcggaagcgactcgtctcaaacggacagctcgtagaaggtatacacgtcggaagaatcgtatttgttatctacaggagattttttcaaatgagatggcgaaagtagatgatagtttctttcatcgacttgaagagtcttttttggtggaagaagacaagaagcatgaacgtcatcctatttttggaaatatagtagatgaagttgcttatcatgagaaatatccaactatctatcatctgcgaaaaaaattggtagattctactgataaagcggatttgcgcttaatctatttggccttagcgcatatgattaagtttcgtggtcattttttgattgagggagatttaaatcctgataatagtgatgtggacaaactatttatccagttggtacaaacctacaatcaattatttgaagaaaaccctattaacgcaagtggagtagatgctaaagcgattctttctgcacgattgagtaaatcaagacgattagaaaatctcattgctcagctccccggtgagaagaaaaatggcttatttgggaatctcattgctttgtcattgggtttgacccctaattttaaatcaaattttgatttggcagaagatgctaaattacagctttcaaaagatacttacgatgatgatttagataatttattggcgcaaattggagatcaatatgctgatttgtttttggcagctaagaatttatcagatgctattttactttcagatatcctaagagtaaatactgaaataactaaggctcccctatcagcttcaatgattaaacgctacgatgaacatcatcaagacttgactcttttaaaagctttagttcgacaacaacttccagaaaagtataaagaaatcttttttgatcaatcaaaaaacggatatgcaggttatattgatgggggagctagccaagaagaattttataaatttatcaaaccaattttagaaaaaatggatggtactgaggaattattggtgaaactaaatcgtgaagatttgctgcgcaagcaacggacctttgacaacggctctattccccatcaaattcacttgggtgagctgcatgctattttgagaagacaagaagacttttatccatttttaaaagacaatcgtgagaagattgaaaaaatcttgacttttcgaattccttattatgttggtccattggcgcgtggcaatagtcgttttgcatggatgactcggaagtctgaagaaacaattaccccatggaattttgaagaagttgtcgataaaggtgcttcagctcaatcatttattgaacgcatgacaaactttgataaaaatcttccaaatgaaaaagtactaccaaaacatagtttgctttatgagtattttacggtttataacgaattgacaaaggtcaaatatgttactgaaggaatgcgaaaaccagcatttctttcaggtgaacagaagaaagccattgttgatttactcttcaaaacaaatcgaaaagtaaccgttaagcaattaaaagaagattatttcaaaaaaatagaatgttttgatagtgttgaaatttcaggagttgaagatagatttaatgcttcattaggtacctaccatgatttgctaaaaattattaaagataaagattttttggataatgaagaaaatgaagatatcttagaggatattgttttaacattgaccttatttgaagatagggagatgattgaggaaagacttaaaacatatgctcacctctttgatgataaggtgatgaaacagcttaaacgtcgccgttatactggttggggacgtttgtctcgaaaattgattaatggtattagggataagcaatctggcaaaacaatattagattttttgaaatcagatggttttgccaatcgcaattttatgcagctgatccatgatgatagtttgacatttaaagaagacattcaaaaagcacaagtgtctggacaaggcgatagtttacatgaacatattgcaaatttagctggtagccctgctattaaaaaaggtattttacagactgtaaaagttgttgatgaattggtcaaagtaatggggcggcataagccagaaaatatcgttattgaaatggcacgtgaaaatcagacaactcaaaagggccagaaaaattcgcgagagcgtatgaaacgaatcgaagaaggtatcaaagaattaggaagtcagattcttaaagagcatcctgttgaaaatactcaattgcaaaatgaaaagctctatctctattatctccaaaatggaagagacatgtatgtggaccaagaattagatattaatcgtttaagtgattatgatgtcgatcacattgttccacaaagtttccttaaagacgattcaatagacaataaggtcttaacgcgttctgataaaaatcgtggtaaatcggataacgttccaagtgaagaagtagtcaaaaagatgaaaaactattggagacaacttctaaacgccaagttaatcactcaacgtaagtttgataatttaacgaaagctgaacgtggaggtttgagtgaacttgataaagctggttttatcaaacgccaattggttgaaactcgccaaatcactaagcatgtggcacaaattttggatagtcgcatgaatactaaatacgatgaaaatgataaacttattcgagaggttaaagtgattaccttaaaatctaaattagtttctgacttccgaaaagatttccaattctataaagtacgtgagattaacaattaccatcatgcccatgatgcgtatctaaatgccgtcgttggaactgctttgattaagaaatatccaaaacttgaatcggagtttgtctatggtgattataaagtttatgatgttcgtaaaatgattgctaagtctgagcaagaaataggcaaagcaaccgcaaaatatttcttttactctaatatcatgaacttcttcaaaacagaaattacacttgcaaatggagagattcgcaaacgccctctaatcgaaactaatggggaaactggagaaattgtctgggataaagggcgagattttgccacagtgcgcaaagtattgtccatgccccaagtcaatattgtcaagaaaacagaagtacagacaggcggattctccaaggagtcaattttaccaaaaagaaattcggacaagcttattgctcgtaaaaaagactgggatccaaaaaaatatggtggttttgatagtccaacggtagcttattcagtcctagtggttgctaaggtggaaaaagggaaatcgaagaagttaaaatccgttaaagagttactagggatcacaattatggaaagaagttcctttgaaaaaaatccgattgactttttagaagctaaaggatataaggaagttaaaaaagacttaatcattaaactacctaaatatagtctttttgagttagaaaacggtcgtaaacggatgctggctagtgccggagaattacaaaaaggaaatgagctggctctgccaagcaaatatgtgaattttttatatttagctagtcattatgaaaagttgaagggtagtccagaagataacgaacaaaaacaattgtttgtggagcagcataagcattatttagatgagattattgagcaaatcagtgaattttctaagcgtgttattttagcagatgccaatttagataaagttcttagtgcatataacaaacatagagacaaaccaatacgtgaacaagcagaaaatattattcatttatttacgttgacgaatcttggagctcccgctgcttttaaatattttgatacaacaattgatcgtaaacgatatacgtctacaaaagaagttttagatgccactcttatccatcaatccatcactggtctttatgaaacacgcattgatttgagtcagctaggaggtgactga

SEQ ID NO: 203 - protein, 1368 aa, synthetic construct
  REGION 1..1368: note = catalytically inactive Cas9 (dCas9)polypeptide sequence
  REGION 5..58: note = MISC_FEATURE - RuvC domain
  REGION 718..764: note = MISC_FEATURE - RuvC domain
  REGION 773..902: note = MISC_FEATURE - HNH domain
  REGION 907..1102: note = MISC_FEATURE - RuvC domain
MDKKYSIGLAIGTNSVGWAVITDEYKVPSKKFKVLGNTDRHSIKKNLIGALLFDSGETAEATRLKRTARRRYTRRKNRICYLQEIFSNEMAKVDDSFFHRLEESFLVEEDKKHERHPIFGNIVDEVAYHEKYPTIYHLRKKLVDSTDKADLRLIYLALAHMIKFRGHFLIEGDLNPDNSDVDKLFIQLVQTYNQLFEENPINASGVDAKAILSARLSKSRRLENLIAQLPGEKKNGLFGNLIALSLGLTPNFKSNFDLAEDAKLQLSKDTYDDDLDNLLAQIGDQYADLFLAAKNLSDAILLSDILRVNTEITKAPLSASMIKRYDEHHQDLTLLKALVRQQLPEKYKEIFFDQSKNGYAGYIDGGASQEEFYKFIKPILEKMDGTEELLVKLNREDLLRKQRTFDNGSIPHQIHLGELHAILRRQEDFYPFLKDNREKIEKILTFRIPYYVGPLARGNSRFAWMTRKSEETITPWNFEEVVDKGASAQSFIERMTNFDKNLPNEKVLPKHSLLYEYFTVYNELTKVKYVTEGMRKPAFLSGEQKKAIVDLLFKTNRKVTVKQLKEDYFKKIECFDSVEISGVEDRFNASLGTYHDLLKIIKDKDFLDNEENEDILEDIVLTLTLFEDREMIEERLKTYAHLFDDKVMKQLKRRRYTGWGRLSRKLINGIRDKQSGKTILDFLKSDGFANRNFMQLIHDDSLTFKEDIQKAQVSGQGDSLHEHIANLAGSPAIKKGILQTVKVVDELVKVMGRHKPENIVIEMARENQTTQKGQKNSRERMKRIEEGIKELGSQILKEHPVENTQLQNEKLYLYYLQNGRDMYVDQELDINRLSDYDVDAIVPQSFLKDDSIDNKVLTRSDKNRGKSDNVPSEEVVKKMKNYWRQLLNAKLITQRKFDNLTKAERGGLSELDKAGFIKRQLVETRQITKHVAQILDSRMNTKYDENDKLIREVKVITLKSKLVSDFRKDFQFYKVREINNYHHAHDAYLNAVVGTALIKKYPKLESEFVYGDYKVYDVRKMIAKSEQEIGKATAKYFFYSNIMNFFKTEITLANGEIRKRPLIETNGETGEIVWDKGRDFATVRKVLSMPQVNIVKKTEVQTGGFSKESILPKRNSDKLIARKKDWDPKKYGGFDSPTVAYSVLVVAKVEKGKSKKLKSVKELLGITIMERSSFEKNPIDFLEAKGYKEVKKDLIIKLPKYSLFELENGRKRMLASAGELQKGNELALPSKYVNFLYLASHYEKLKGSPEDNEQKQLFVEQHKHYLDEIIEQISEFSKRVILADANLDKVLSAYNKHRDKPIREQAENIIHLFTLTNLGAPAAFKYFDTTIDRKRYTSTKEVLDATLIHQSITGLYETRIDLSQLGGD

SEQ ID NO: 204 - protein, 345 aa, Sulfolobus islandicus
  REGION 1..345: note = MISC_FEATURE - tr|F0NN87|F0NN87_SULIHCRISPR-associatedCasx protein OS =Sulfolobus islandicus (strain HVE10/4) GN = SiH_0402 PE=4; SV = 1);CasX polypeptide sequence
MEVPLYNIFGDNYIIQVATEAENSTIYNNKVEIDDEELRNVLNLAYKIAKNNEDAAAERRGKAKKKKGEEGETTTSNIILPLSGNDKNPWTETLKCYNFPTTVALSEVFKNFSQVKECEEVSAPSFVKPEFYEFGRSPGMVERTRRVKLEVEPHYLIIAAAGWVLTRLGKAKVSEGDYVGVNVFTPTRGILYSLIQNVNGIVPGIKPETAFGLWIARKVVSSVTNPNVSVVRIYTISDAVGQNPTTINGGFSIDLTKLLEKRYLLSERLEAIARNALSISSNMRERYIVLANYIYEYLTGSKRLEDLLYFANRDLIMNLNSDDGKVRDLKLISAYVNGELIRGEG

SEQ ID NO: 205 - protein, 345 aa, Sulfolobus islandicus
  REGION 1..345: note = MISC_FEATURE - tr|F0NH53|F0NH53_SULIR CRISPR associated protein, Casx OS =Sulfolobus islandicus (strain REY15A) GN=SiRe_0771 PE=4 SV=1);CasX polypeptide sequence
MEVPLYNIFGDNYIIQVATEAENSTIYNNKVEIDDEELRNVLNLAYKIAKNNEDAAAERRGKAKKKKGEEGETTTSNIILPLSGNDKNPWTETLKCYNFPTTVALSEVFKNFSQVKECEEVSAPSFVKPEFYKFGRSPGMVERTRRVKLEVEPHYLIMAAAGWVLTRLGKAKVSEGDYVGVNVFTPTRGILYSLIQNVNGIVPGIKPETAFGLWIARKVVSSVTNPNVSVVSIYTISDAVGQNPTTINGGFSIDLTKLLEKRDLLSERLEAIARNALSISSNMRERYIVLANYIYEYLTGSKRLEDLLYFANRDLIMNLNSDDGKVRDLKLISAYVNGELIRGEG

SEQ ID NO: 206 - protein, 987 aa, unidentified
  REGION 1..987: note = MISC_FEATURE - CasX polypeptide sequence
MEKRINKIRKKLSADNATKPVSRSGPMKTLLVRVMTDDLKKRLEKRRKKPEVMPQVISNNAANNLRMLLDDYTKMKEAILQVYWQEFKDDHVGLMCKFAQPASKKIDQNKLKPEMDEKGNLTTAGFACSQCGQPLFVYKLEQVSEKGKAYTNYFGRCNVAEHEKLILLAQLKPVKDSDEAVTYSLGKFGQRALDFYSIHVTKESTHPVKPLAQIAGNRYASGPVGKALSDACMGTIASFLSKYQDIIIEHQKVVKGNQKRLESLRELAGKENLEYPSVTLPPQPHTKEGVDFAYNEVIARVRMWVNLNLWQKLKLSRDDAKPLLRLKGFPSFPVVERRENEVDWWNTINEVKKLIDAKRDMGRVFWSGVTAEKRNTILEGYNYLPNENDHKKREGSLENPKKPAKRQFGDLLLYLEKKYAGDWGKVFDEAWERIDKKIAGLTSHIEREEARNAEDAQSKAVLTDWLRAKASFVLERLKEMDEKEFYACEIQLQKWYGDLRGNPFAVEAENRVVDISGFSIGSDGHSIQYRNLLAWKYLENGKREFYLLMNYGKKGRIRFTDGTDIKKSGKWQGLLYGGGKAKVIDLTFDPDDEQLIILPLAFGTRQGREFIWNDLLSLETGLIKLANGRVIEKTIYNKKIGRDEPALFVALTFERREVVDPSNIKPVNLIGVARGENIPAVIALTDPEGCPLPEFKDSSGGPTDILRIGEGYKEKQRAIQAAKEVEQRRAGGYSRKFASKSRNLADDMVRNSARDLFYHAVTHDAVLVFANLSRGFGRQGKRTFMTERQYTKMEDWLTAKLAYEGLTSKTYLSKTLAQYTSKTCSNCGFTITYADMDVMLVRLKKTSDGWATTLNNKELKAEYQITYYNRYKRQTVEKELSAELDRLSEESGNNDISKWTKGRRDEALFLLKKRFSHRPVQEQFVCLDCGHEVHAAEQAALNIARSWLFLNSNSTEFKSYKSGKQPFVGAWQAFYKRRLKEVWKPNA

SEQ ID NO: 207 - protein, 1210 aa, unidentified
  REGION 1..1210: note = MISC_FEATURE - APG80656.1 CRISPR-associated protein CasY [uncultured Parcubacteria group bacterium]; CasY polypeptide sequence
MSKRHPRISGVKGYRLHAQRLEYTGKSGAMRTIKYPLYSSPSGGRTVPREIVSAINDDYVGLYGLSNFDDLYNAEKRNEEKVYSVLDFWYDCVQYGAVFSYTAPGLLKNVAEVRGGSYELTKTLKGSHLYDELQIDKVIKFLNKKEISRANGSLDKLKKDIIDCFKAEYRERHKDQCNKLADDIKNAKKDAGASLGERQKKLFRDFFGISEQSENDKPSFTNPLNLTCCLLPFDTVNNNRNRGEVLFNKLKEYAQKLDKNEGSLEMWEYIGIGNSGTAFSNFLGEGFLGRLRENKITELKKAMMDITDAWRGQEQEEELEKRLRILAALTIKLREPKFDNHWGGYRSDINGKLSSWLQNYINQTVKIKEDLKGHKKDLKKAKEMINRFGESDTKEEAVVSSLLESIEKIVPDDSADDEKPDIPAIAIYRRFLSDGRLTLNRFVQREDVQEALIKERLEAEKKKKPKKRKKKSDAEDEKETIDFKELFPHLAKPLKLVPNFYGDSKRELYKKYKNAAIYTDALWKAVEKIYKSAFSSSLKNSFFDTDFDKDFFIKRLQKIFSVYRRFNTDKWKPIVKNSFAPYCDIVSLAENEVLYKPKQSRSRKSAAIDKNRVRLPSTENIAKAGIALARELSVAGFDWKDLLKKEEHEEYIDLIELHKTALALLLAVTETQLDISALDFVENGTVKDFMKTRDGNLVLEGRFLEMFSQSIVFSELRGLAGLMSRKEFITRSAIQTMNGKQAELLYIPHEFQSAKITTPKEMSRAFLDLAPAEFATSLEPESLSEKSLLKLKQMRYYPHYFGYELTRTGQGIDGGVAENALRLEKSPVKKREIKCKQYKTLGRGQNKIVLYVRSSYYQTQFLEWFLHRPKNVQTDVAVSGSFLIDEKKVKTRWNYDALTVALEPVSGSERVFVSQPFTIFPEKSAEEEGQRYLGIDIGEYGIAYTALEITGDSAKILDQNFISDPQLKTLREEVKGLKLDQRRGTFAMPSTKIARIRESLVHSLRNRIHHLALKHKAKIVYELEVSRFEEGKQKIKKVYATLKKADVYSEIDADKNLQTTVWGKLAVASEISASYTSQFCGACKKLWRAEMQVDETITTQELIGTVRVIKGGTLIDAIKDFMRPPIFDENDTPFPKYRDFCDKHHISKKMRGNSCLFICPFCRANADADIQASQTIALLRYVKEEKKVEDYFERFRKLKNIKVLGQMKKI

SEQ ID NO: 208 - protein, 1082 aa, Neisseria meningitidis
  REGION 1..1082: note = MISC_FEATURE - NCBI Reference: WP_002235162.1; type II CRISPR RNA-guided endonuclease Cas9; Nme1Cas9 polypeptide sequence
MAAFKPNPINYILGLDIGIASVGWAMVEIDEDENPICLIDLGVRVFERAEVPKTGDSLAMARRLARSVRRLTRRRAHRLLRARRLLKREGVLQAADFDENGLIKSLPNTPWQLRAAALDRKLTPLEWSAVLLHLIKHRGYLSQRKNEGETADKELGALLKGVADNAHALQTGDFRTPAELALNKFEKESGHIRNQRGDYSHTFSRKDLQAELILLFEKQKEFGNPHVSGGLKEGIETLLMTQRPALSGDAVQKMLGHCTFEPAEPKAAKNTYTAERFIWLTKLNNLRILEQGSERPLTDTERATLMDEPYRKSKLTYAQARKLLGLEDTAFFKGLRYGKDNAEASTLMEMKAYHAISRALEKEGLKDKKSPLNLSPELQDEIGTAFSLFKTDEDITGRLKDRIQPEILEALLKHISFDKFVQISLKALRRIVPLMEQGKRYDEACAEIYGDHYGKKNTEEKIYLPPIPADEIRNPVVLRALSQARKVINGVVRRYGSPARIHIETAREVGKSFKDRKEIEKRQEENRKDREKAAAKFREYFPNFVGEPKSKDILKLRLYEQQHGKCLYSGKEINLGRLNEKGYVEIDHALPFSRTWDDSFNNKVLVLGSENQNKGNQTPYEYFNGKDNSREWQEFKARVETSRFPRSKKQRILLQKFDEDGFKERNLNDTRYVNRFLCQFVADRMRLTGKGKKRVFASNGQITNLLRGFWGLRKVRAENDRHHALDAVVVACSTVAMQQKITRFVRYKEMNAFDGKTIDKETGEVLHQKTHFPQPWEFFAQEVMIRVFGKPDGKPEFEEADTPEKLRTLLAEKLSSRPEAVHEYVTPLFVSRAPNRKMSGQGHMETVKSAKRLDEGVSVLRVPLTQLKLKDLEKMVNREREPKLYEALKARLEAHKDDPAKAFAEPFYKYDKAGNRTQQVKAVRVEQVQKTGVWVRNHNGIADNATMVRVDVFEKGDKYYLVPIYSWQVAKGILPDRAVVQGKDEEDWQLIDDSFNFKFSLHPNDLVEVITKKARMFGYFASCHRGTGNINIRIHDLDHKIGKNGILEGIGVKTALSFQKYQIDELGKEIRPCRLKKRPPVR

SEQ ID NO: 209 - protein, 1082 aa, Neisseria meningitidis
  REGION 1..1082: note = MISC_FEATURE - NCBI Reference: WP_002230835; type II CRISPR RNA-guided endonuclease Cas9; Nme2Cas9 polypeptide sequence
MAAFKPNPINYILGLDIGIASVGWAMVEIDEEENPIRLIDLGVRVFERAEVPKTGDSLAMARRLARSVRRLTRRRAHRLLRARRLLKREGVLQAADFDENGLIKSLPNTPWQLRAAALDRKLTPLEWSAVLLHLIKHRGYLSQRKNEGETADKELGALLKGVANNAHALQTGDFRTPAELALNKFEKESGHIRNQRGDYSHTFSRKDLQAELILLFEKQKEFGNPHVSGGLKEGIETLLMTQRPALSGDAVQKMLGHCTFEPAEPKAAKNTYTAERFIWLTKLNNLRILEQGSERPLTDTERATLMDEPYRKSKLTYAQARKLLGLEDTAFFKGLRYGKDNAEASTLMEMKAYHAISRALEKEGLKDKKSPLNLSSELQDEIGTAFSLFKTDEDITGRLKDRVQPEILEALLKHISFDKFVQISLKALRRIVPLMEQGKRYDEACAEIYGDHYGKKNTEEKIYLPPIPADEIRNPVVLRALSQARKVINGVVRRYGSPARIHIETAREVGKSFKDRKEIEKRQEENRKDREKAAAKFREYFPNFVGEPKSKDILKLRLYEQQHGKCLYSGKEINLVRLNEKGYVEIDHALPFSRTWDDSFNNKVLVLGSENQNKGNQTPYEYFNGKDNSREWQEFKARVETSRFPRSKKQRILLQKFDEDGFKECNLNDTRYVNRFLCQFVADHILLTGKGKRRVFASNGQITNLLRGFWGLRKVRAENDRHHALDAVVVACSTVAMQQKITRFVRYKEMNAFDGKTIDKETGKVLHQKTHFPQPWEFFAQEVMIRVFGKPDGKPEFEEADTPEKLRTLLAEKLSSRPEAVHEYVTPLFVSRAPNRKMSGAHKDTLRSAKRFVKHNEKISVKRVWLTEIKLADLENMVNYKNGREIELYEALKARLEAYGGNAKQAFDPKDNPFYKKGGQLVKAVRVEKTQESGVLLNKKNAYTIADNGDMVRVDVFCKVDKKGKNQYFIVPIYAWQVAENILPDIDCKGYRIDDSYTFCFSLHKYDLIAFQKDEKSKVEFAYYINCDSSNGRFYLAWHDKGSKEQQFRISTQNLVLIQKYQVNELGKEIRPCRLKKRPPVR

SEQ ID NO: 210 - protein, 1300 aa, Francisella tularensis
  REGION 1..1300: note = MISC_FEATURE - wild type Cpf1 polypeptide sequence
  source 1..1300: note = subspecies novicida
MSIYQEFVNKYSLSKTLRFELIPQGKTLENIKARGLILDDEKRAKDYKKAKQIIDKYHQFFIEEILSSVCISEDLLQNYSDVYFKLKKSDDDNLQKDFKSAKDTIKKQISEYIKDSEKFKNLFNQNLIDAKKGQESDLILWLKQSKDNGIELFKANSDITDIDEALEIIKSFKGWTTYFKGFHENRKNVYSSNDIPTSIIYRIVDDNLPKFLENKAKYESLKDKAPEAINYEQIKKDLAEELTFDIDYKTSEVNQRVFSLDEVFEIANFNNYLNQSGITKFNTIIGGKFVNGENTKRKGINEYINLYSQQINDKTLKKYKMSVLFKQILSDTESKSFVIDKLEDDSDVVTTMQSFYEQIAAFKTVEEKSIKETLSLLFDDLKAQKLDLSKIYFKNDKSLTDLSQQVFDDYSVIGTAVLEYITQQIAPKNLDNPSKKEQELIAKKTEKAKYLSLETIKLALEEFNKHRDIDKQCRFEEILANFAAIPMIFDEIAQNKDNLAQISIKYQNQGKKDLLQASAEDDVKAIKDLLDQTNNLLHKLKIFHISQSEDKANILDKDEHFYLVFEECYFELANIVPLYNKIRNYITQKPYSDEKFKLNFENSTLANGWDKNKEPDNTAILFIKDDKYYLGVMNKKNNKIFDDKAIKENKGEGYKKIVYKLLPGANKMLPKVFFSAKSIKFYNPSEDILRIRNHSTHTKNGSPQKGYEKFEFNIEDCRKFIDFYKQSISKHPEWKDFGFRFSDTQRYNSIDEFYREVENQGYKLTFENISESYIDSVVNQGKLYLFQIYNKDFSAYSKGRPNLHTLYWKALFDERNLQDVVYKLNGEAELFYRKQSIPKKITHPAKEAIANKNKDNPKKESVFEYDLIKDKRFTEDKFFFHCPITINFKSSGANKFNDEINLLLKEKANDVHILSIDRGERHLAYYTLVDGKGNIIKQDTFNIIGNDRMKTNYHDKLAAIEKDRDSARKDWKKINNIKEMKEGYLSQVVHEIAKLVIEYNAIVVFEDLNFGFKRGRFKVEKQVYQKLEKMLIEKLNYLVFKDNEFDKTGGVLRAYQLTAPFETFKKMGKQTGIIYYVPAGFTSKICPVTGFVNQLYPKYESVSKSQEFFSKFDKICYNLDKGYFEFSFDYKNFGDKAAKGKWTIASFGSRLINFRNSDKNHNWDTREVYPTKELEKLLKDYSIEYGHGECIKAAICGESDKKFFAKLTSVLNTILQMRNSKTGTELDYLISPVADVNGNFFDSRQAPKNMPQDADANGAYHIGLKGLMLLGRIKNNQEGKKLNLVIKNEEYFEFVQNRNN

SEQ ID NO: 211 - protein, 1300 aa, Francisella tularensis
  REGION 1..1300: note = MISC_FEATURE - Cpf1 D917A polypeptide sequence
  source 1..1300: note = subspecies novicida
MSIYQEFVNKYSLSKTLRFELIPQGKTLENIKARGLILDDEKRAKDYKKAKQIIDKYHQFFIEEILSSVCISEDLLQNYSDVYFKLKKSDDDNLQKDFKSAKDTIKKQISEYIKDSEKFKNLFNQNLIDAKKGQESDLILWLKQSKDNGIELFKANSDITDIDEALEIIKSFKGWTTYFKGFHENRKNVYSSNDIPTSIIYRIVDDNLPKFLENKAKYESLKDKAPEAINYEQIKKDLAEELTFDIDYKTSEVNQRVFSLDEVFEIANFNNYLNQSGITKFNTIIGGKFVNGENTKRKGINEYINLYSQQINDKTLKKYKMSVLFKQILSDTESKSFVIDKLEDDSDVVTTMQSFYEQIAAFKTVEEKSIKETLSLLFDDLKAQKLDLSKIYFKNDKSLTDLSQQVFDDYSVIGTAVLEYITQQIAPKNLDNPSKKEQELIAKKTEKAKYLSLETIKLALEEFNKHRDIDKQCRFEEILANFAAIPMIFDEIAQNKDNLAQISIKYQNQGKKDLLQASAEDDVKAIKDLLDQTNNLLHKLKIFHISQSEDKANILDKDEHFYLVFEECYFELANIVPLYNKIRNYITQKPYSDEKFKLNFENSTLANGWDKNKEPDNTAILFIKDDKYYLGVMNKKNNKIFDDKAIKENKGEGYKKIVYKLLPGANKMLPKVFFSAKSIKFYNPSEDILRIRNHSTHTKNGSPQKGYEKFEFNIEDCRKFIDFYKQSISKHPEWKDFGFRFSDTQRYNSIDEFYREVENQGYKLTFENISESYIDSVVNQGKLYLFQIYNKDFSAYSKGRPNLHTLYWKALFDERNLQDVVYKLNGEAELFYRKQSIPKKITHPAKEAIANKNKDNPKKESVFEYDLIKDKRFTEDKFFFHCPITINFKSSGANKFNDEINLLLKEKANDVHILSIARGERHLAYYTLVDGKGNIIKQDTFNIIGNDRMKTNYHDKLAAIEKDRDSARKDWKKINNIKEMKEGYLSQVVHEIAKLVIEYNAIVVFEDLNFGFKRGRFKVEKQVYQKLEKMLIEKLNYLVFKDNEFDKTGGVLRAYQLTAPFETFKKMGKQTGIIYYVPAGFTSKICPVTGFVNQLYPKYESVSKSQEFFSKFDKICYNLDKGYFEFSFDYKNFGDKAAKGKWTIASFGSRLINFRNSDKNHNWDTREVYPTKELEKLLKDYSIEYGHGECIKAAICGESDKKFFAKLTSVLNTILQMRNSKTGTELDYLISPVADVNGNFFDSRQAPKNMPQDADANGAYHIGLKGLMLLGRIKNNQEGKKLNLVIKNEEYFEFVQNRNN

SEQ ID NO: 212 - protein, 1300 aa, Francisella tularensis
  REGION 1..1300: note = MISC_FEATURE - Cpf1 E1006A polypeptide sequence
  source 1..1300: note = subspecies novicida
MSIYQEFVNKYSLSKTLRFELIPQGKTLENIKARGLILDDEKRAKDYKKAKQIIDKYHQFFIEEILSSVCISEDLLQNYSDVYFKLKKSDDDNLQKDFKSAKDTIKKQISEYIKDSEKFKNLFNQNLIDAKKGQESDLILWLKQSKDNGIELFKANSDITDIDEALEIIKSFKGWTTYFKGFHENRKNVYSSNDIPTSIIYRIVDDNLPKFLENKAKYESLKDKAPEAINYEQIKKDLAEELTFDIDYKTSEVNQRVFSLDEVFEIANFNNYLNQSGITKFNTIIGGKFVNGENTKRKGINEYINLYSQQINDKTLKKYKMSVLFKQILSDTESKSFVIDKLEDDSDVVTTMQSFYEQIAAFKTVEEKSIKETLSLLFDDLKAQKLDLSKIYFKNDKSLTDLSQQVFDDYSVIGTAVLEYITQQIAPKNLDNPSKKEQELIAKKTEKAKYLSLETIKLALEEFNKHRDIDKQCRFEEILANFAAIPMIFDEIAQNKDNLAQISIKYQNQGKKDLLQASAEDDVKAIKDLLDQTNNLLHKLKIFHISQSEDKANILDKDEHFYLVFEECYFELANIVPLYNKIRNYITQKPYSDEKFKLNFENSTLANGWDKNKEPDNTAILFIKDDKYYLGVMNKKNNKIFDDKAIKENKGEGYKKIVYKLLPGANKMLPKVFFSAKSIKFYNPSEDILRIRNHSTHTKNGSPQKGYEKFEFNIEDCRKFIDFYKQSISKHPEWKDFGFRFSDTQRYNSIDEFYREVENQGYKLTFENISESYIDSVVNQGKLYLFQIYNKDFSAYSKGRPNLHTLYWKALFDERNLQDVVYKLNGEAELFYRKQSIPKKITHPAKEAIANKNKDNPKKESVFEYDLIKDKRFTEDKFFFHCPITINFKSSGANKFNDEINLLLKEKANDVHILSIDRGERHLAYYTLVDGKGNIIKQDTFNIIGNDRMKTNYHDKLAAIEKDRDSARKDWKKINNIKEMKEGYLSQVVHEIAKLVIEYNAIVVFADLNFGFKRGRFKVEKQVYQKLEKMLIEKLNYLVFKDNEFDKTGGVLRAYQLTAPFETFKKMGKQTGIIYYVPAGFTSKICPVTGFVNQLYPKYESVSKSQEFFSKFDKICYNLDKGYFEFSFDYKNFGDKAAKGKWTIASFGSRLINFRNSDKNHNWDTREVYPTKELEKLLKDYSIEYGHGECIKAAICGESDKKFFAKLTSVLNTILQMRNSKTGTELDYLISPVADVNGNFFDSRQAPKNMPQDADANGAYHIGLKGLMLLGRIKNNQEGKKLNLVIKNEEYFEFVQNRNN

SEQ ID NO: 213 - protein, 1300 aa, Francisella tularensis
  REGION 1..1300: note = MISC_FEATURE - Cpf1 D1255A polypeptide sequence
  source 1..1300: note = subspecies novicida
MSIYQEFVNKYSLSKTLRFELIPQGKTLENIKARGLILDDEKRAKDYKKAKQIIDKYHQFFIEEILSSVCISEDLLQNYSDVYFKLKKSDDDNLQKDFKSAKDTIKKQISEYIKDSEKFKNLFNQNLIDAKKGQESDLILWLKQSKDNGIELFKANSDITDIDEALEIIKSFKGWTTYFKGFHENRKNVYSSNDIPTSIIYRIVDDNLPKFLENKAKYESLKDKAPEAINYEQIKKDLAEELTFDIDYKTSEVNQRVFSLDEVFEIANFNNYLNQSGITKFNTIIGGKFVNGENTKRKGINEYINLYSQQINDKTLKKYKMSVLFKQILSDTESKSFVIDKLEDDSDVVTTMQSFYEQIAAFKTVEEKSIKETLSLLFDDLKAQKLDLSKIYFKNDKSLTDLSQQVFDDYSVIGTAVLEYITQQIAPKNLDNPSKKEQELIAKKTEKAKYLSLETIKLALEEFNKHRDIDKQCRFEEILANFAAIPMIFDEIAQNKDNLAQISIKYQNQGKKDLLQASAEDDVKAIKDLLDQTNNLLHKLKIFHISQSEDKANILDKDEHFYLVFEECYFELANIVPLYNKIRNYITQKPYSDEKFKLNFENSTLANGWDKNKEPDNTAILFIKDDKYYLGVMNKKNNKIFDDKAIKENKGEGYKKIVYKLLPGANKMLPKVFFSAKSIKFYNPSEDILRIRNHSTHTKNGSPQKGYEKFEFNIEDCRKFIDFYKQSISKHPEWKDFGFRFSDTQRYNSIDEFYREVENQGYKLTFENISESYIDSVVNQGKLYLFQIYNKDFSAYSKGRPNLHTLYWKALFDERNLQDVVYKLNGEAELFYRKQSIPKKITHPAKEAIANKNKDNPKKESVFEYDLIKDKRFTEDKFFFHCPITINFKSSGANKFNDEINLLLKEKANDVHILSIDRGERHLAYYTLVDGKGNIIKQDTFNIIGNDRMKTNYHDKLAAIEKDRDSARKDWKKINNIKEMKEGYLSQVVHEIAKLVIEYNAIVVFEDLNFGFKRGRFKVEKQVYQKLEKMLIEKLNYLVFKDNEFDKTGGVLRAYQLTAPFETFKKMGKQTGIIYYVPAGFTSKICPVTGFVNQLYPKYESVSKSQEFFSKFDKICYNLDKGYFEFSFDYKNFGDKAAKGKWTIASFGSRLINFRNSDKNHNWDTREVYPTKELEKLLKDYSIEYGHGECIKAAICGESDKKFFAKLTSVLNTILQMRNSKTGTELDYLISPVADVNGNFFDSRQAPKNMPQDAAANGAYHIGLKGLMLLGRIKNNQEGKKLNLVIKNEEYFEFVQNRNN

SEQ ID NO: 214 - protein, 1300 aa, Francisella tularensis
  REGION 1..1300: note = MISC_FEATURE - Cpf1 D917A/E1006A polypeptide sequence
  source 1..1300: note = subspecies novicida
MSIYQEFVNKYSLSKTLRFELIPQGKTLENIKARGLILDDEKRAKDYKKAKQIIDKYHQFFIEEILSSVCISEDLLQNYSDVYFKLKKSDDDNLQKDFKSAKDTIKKQISEYIKDSEKFKNLFNQNLIDAKKGQESDLILWLKQSKDNGIELFKANSDITDIDEALEIIKSFKGWTTYFKGFHENRKNVYSSNDIPTSIIYRIVDDNLPKFLENKAKYESLKDKAPEAINYEQIKKDLAEELTFDIDYKTSEVNQRVFSLDEVFEIANFNNYLNQSGITKFNTIIGGKFVNGENTKRKGINEYINLYSQQINDKTLKKYKMSVLFKQILSDTESKSFVIDKLEDDSDVVTTMQSFYEQIAAFKTVEEKSIKETLSLLFDDLKAQKLDLSKIYFKNDKSLTDLSQQVFDDYSVIGTAVLEYITQQIAPKNLDNPSKKEQELIAKKTEKAKYLSLETIKLALEEFNKHRDIDKQCRFEEILANFAAIPMIFDEIAQNKDNLAQISIKYQNQGKKDLLQASAEDDVKAIKDLLDQTNNLLHKLKIFHISQSEDKANILDKDEHFYLVFEECYFELANIVPLYNKIRNYITQKPYSDEKFKLNFENSTLANGWDKNKEPDNTAILFIKDDKYYLGVMNKKNNKIFDDKAIKENKGEGYKKIVYKLLPGANKMLPKVFFSAKSIKFYNPSEDILRIRNHSTHTKNGSPQKGYEKFEFNIEDCRKFIDFYKQSISKHPEWKDFGFRFSDTQRYNSIDEFYREVENQGYKLTFENISESYIDSVVNQGKLYLFQIYNKDFSAYSKGRPNLHTLYWKALFDERNLQDVVYKLNGEAELFYRKQSIPKKITHPAKEAIANKNKDNPKKESVFEYDLIKDKRFTEDKFFFHCPITINFKSSGANKFNDEINLLLKEKANDVHILSIARGERHLAYYTLVDGKGNIIKQDTFNIIGNDRMKTNYHDKLAAIEKDRDSARKDWKKINNIKEMKEGYLSQVVHEIAKLVIEYNAIVVFADLNFGFKRGRFKVEKQVYQKLEKMLIEKLNYLVFKDNEFDKTGGVLRAYQLTAPFETFKKMGKQTGIIYYVPAGFTSKICPVTGFVNQLYPKYESVSKSQEFFSKFDKICYNLDKGYFEFSFDYKNFGDKAAKGKWTIASFGSRLINFRNSDKNHNWDTREVYPTKELEKLLKDYSIEYGHGECIKAAICGESDKKFFAKLTSVLNTILQMRNSKTGTELDYLISPVADVNGNFFDSRQAPKNMPQDADANGAYHIGLKGLMLLGRIKNNQEGKKLNLVIKNEEYFEFVQNRNN

SEQ ID NO: 215 - protein, 1300 aa, Francisella tularensis
  REGION 1..1300: note = MISC_FEATURE - Cpf1 D917A/D1255A polypeptide sequence
  source 1..1300: note = subspecies novicida
MSIYQEFVNKYSLSKTLRFELIPQGKTLENIKARGLILDDEKRAKDYKKAKQIIDKYHQFFIEEILSSVCISEDLLQNYSDVYFKLKKSDDDNLQKDFKSAKDTIKKQISEYIKDSEKFKNLFNQNLIDAKKGQESDLILWLKQSKDNGIELFKANSDITDIDEALEIIKSFKGWTTYFKGFHENRKNVYSSNDIPTSIIYRIVDDNLPKFLENKAKYESLKDKAPEAINYEQIKKDLAEELTFDIDYKTSEVNQRVFSLDEVFEIANFNNYLNQSGITKFNTIIGGKFVNGENTKRKGINEYINLYSQQINDKTLKKYKMSVLFKQILSDTESKSFVIDKLEDDSDVVTTMQSFYEQIAAFKTVEEKSIKETLSLLFDDLKAQKLDLSKIYFKNDKSLTDLSQQVFDDYSVIGTAVLEYITQQIAPKNLDNPSKKEQELIAKKTEKAKYLSLETIKLALEEFNKHRDIDKQCRFEEILANFAAIPMIFDEIAQNKDNLAQISIKYQNQGKKDLLQASAEDDVKAIKDLLDQTNNLLHKLKIFHISQSEDKANILDKDEHFYLVFEECYFELANIVPLYNKIRNYITQKPYSDEKFKLNFENSTLANGWDKNKEPDNTAILFIKDDKYYLGVMNKKNNKIFDDKAIKENKGEGYKKIVYKLLPGANKMLPKVFFSAKSIKFYNPSEDILRIRNHSTHTKNGSPQKGYEKFEFNIEDCRKFIDFYKQSISKHPEWKDFGFRFSDTQRYNSIDEFYREVENQGYKLTFENISESYIDSVVNQGKLYLFQIYNKDFSAYSKGRPNLHTLYWKALFDERNLQDVVYKLNGEAELFYRKQSIPKKITHPAKEAIANKNKDNPKKESVFEYDLIKDKRFTEDKFFFHCPITINFKSSGANKFNDEINLLLKEKANDVHILSIARGERHLAYYTLVDGKGNIIKQDTFNIIGNDRMKTNYHDKLAAIEKDRDSARKDWKKINNIKEMKEGYLSQVVHEIAKLVIEYNAIVVFEDLNFGFKRGRFKVEKQVYQKLEKMLIEKLNYLVFKDNEFDKTGGVLRAYQLTAPFETFKKMGKQTGIIYYVPAGFTSKICPVTGFVNQLYPKYESVSKSQEFFSKFDKICYNLDKGYFEFSFDYKNFGDKAAKGKWTIASFGSRLINFRNSDKNHNWDTREVYPTKELEKLLKDYSIEYGHGECIKAAICGESDKKFFAKLTSVLNTILQMRNSKTGTELDYLISPVADVNGNFFDSRQAPKNMPQDAAANGAYHIGLKGLMLLGRIKNNQEGKKLNLVIKNEEYFEFVQNRNN

SEQ ID NO: 216 - protein, 1300 aa, Francisella tularensis
  REGION 1..1300: note = MISC_FEATURE - Cpf1 E1006A/D1255A polypeptide sequence
  source 1..1300: note = subspecies novicida
MSIYQEFVNKYSLSKTLRFELIPQGKTLENIKARGLILDDEKRAKDYKKAKQIIDKYHQFFIEEILSSVCISEDLLQNYSDVYFKLKKSDDDNLQKDFKSAKDTIKKQISEYIKDSEKFKNLFNQNLIDAKKGQESDLILWLKQSKDNGIELFKANSDITDIDEALEIIKSFKGWTTYFKGFHENRKNVYSSNDIPTSIIYRIVDDNLPKFLENKAKYESLKDKAPEAINYEQIKKDLAEELTFDIDYKTSEVNQRVFSLDEVFEIANFNNYLNQSGITKFNTIIGGKFVNGENTKRKGINEYINLYSQQINDKTLKKYKMSVLFKQILSDTESKSFVIDKLEDDSDVVTTMQSFYEQIAAFKTVEEKSIKETLSLLFDDLKAQKLDLSKIYFKNDKSLTDLSQQVFDDYSVIGTAVLEYITQQIAPKNLDNPSKKEQELIAKKTEKAKYLSLETIKLALEEFNKHRDIDKQCRFEEILANFAAIPMIFDEIAQNKDNLAQISIKYQNQGKKDLLQASAEDDVKAIKDLLDQTNNLLHKLKIFHISQSEDKANILDKDEHFYLVFEECYFELANIVPLYNKIRNYITQKPYSDEKFKLNFENSTLANGWDKNKEPDNTAILFIKDDKYYLGVMNKKNNKIFDDKAIKENKGEGYKKIVYKLLPGANKMLPKVFFSAKSIKFYNPSEDILRIRNHSTHTKNGSPQKGYEKFEFNIEDCRKFIDFYKQSISKHPEWKDFGFRFSDTQRYNSIDEFYREVENQGYKLTFENISESYIDSVVNQGKLYLFQIYNKDFSAYSKGRPNLHTLYWKALFDERNLQDVVYKLNGEAELFYRKQSIPKKITHPAKEAIANKNKDNPKKESVFEYDLIKDKRFTEDKFFFHCPITINFKSSGANKFNDEINLLLKEKANDVHILSIDRGERHLAYYTLVDGKGNIIKQDTFNIIGNDRMKTNYHDKLAAIEKDRDSARKDWKKINNIKEMKEGYLSQVVHEIAKLVIEYNAIVVFADLNFGFKRGRFKVEKQVYQKLEKMLIEKLNYLVFKDNEFDKTGGVLRAYQLTAPFETFKKMGKQTGIIYYVPAGFTSKICPVTGFVNQLYPKYESVSKSQEFFSKFDKICYNLDKGYFEFSFDYKNFGDKAAKGKWTIASFGSRLINFRNSDKNHNWDTREVYPTKELEKLLKDYSIEYGHGECIKAAICGESDKKFFAKLTSVLNTILQMRNSKTGTELDYLISPVADVNGNFFDSRQAPKNMPQDAAANGAYHIGLKGLMLLGRIKNNQEGKKLNLVIKNEEYFEFVQNRNN

SEQ ID NO: 217 - protein, 1300 aa, Francisella tularensis
  REGION 1..1300: note = MISC_FEATURE - Cpf1 D917A/E1006A/D1255A polypeptide sequence
  source 1..1300: note = subspecies novicida
MSIYQEFVNKYSLSKTLRFELIPQGKTLENIKARGLILDDEKRAKDYKKAKQIIDKYHQFFIEEILSSVCISEDLLQNYSDVYFKLKKSDDDNLQKDFKSAKDTIKKQISEYIKDSEKFKNLFNQNLIDAKKGQESDLILWLKQSKDNGIELFKANSDITDIDEALEIIKSFKGWTTYFKGFHENRKNVYSSNDIPTSIIYRIVDDNLPKFLENKAKYESLKDKAPEAINYEQIKKDLAEELTFDIDYKTSEVNQRVFSLDEVFEIANFNNYLNQSGITKFNTIIGGKFVNGENTKRKGINEYINLYSQQINDKTLKKYKMSVLFKQILSDTESKSFVIDKLEDDSDVVTTMQSFYEQIAAFKTVEEKSIKETLSLLFDDLKAQKLDLSKIYFKNDKSLTDLSQQVFDDYSVIGTAVLEYITQQIAPKNLDNPSKKEQELIAKKTEKAKYLSLETIKLALEEFNKHRDIDKQCRFEEILANFAAIPMIFDEIAQNKDNLAQISIKYQNQGKKDLLQASAEDDVKAIKDLLDQTNNLLHKLKIFHISQSEDKANILDKDEHFYLVFEECYFELANIVPLYNKIRNYITQKPYSDEKFKLNFENSTLANGWDKNKEPDNTAILFIKDDKYYLGVMNKKNNKIFDDKAIKENKGEGYKKIVYKLLPGANKMLPKVFFSAKSIKFYNPSEDILRIRNHSTHTKNGSPQKGYEKFEFNIEDCRKFIDFYKQSISKHPEWKDFGFRFSDTQRYNSIDEFYREVENQGYKLTFENISESYIDSVVNQGKLYLFQIYNKDFSAYSKGRPNLHTLYWKALFDERNLQDVVYKLNGEAELFYRKQSIPKKITHPAKEAIANKNKDNPKKESVFEYDLIKDKRFTEDKFFFHCPITINFKSSGANKFNDEINLLLKEKANDVHILSIARGERHLAYYTLVDGKGNIIKQDTFNIIGNDRMKTNYHDKLAAIEKDRDSARKDWKKINNIKEMKEGYLSQVVHEIAKLVIEYNAIVVFADLNFGFKRGRFKVEKQVYQKLEKMLIEKLNYLVFKDNEFDKTGGVLRAYQLTAPFETFKKMGKQTGIIYYVPAGFTSKICPVTGFVNQLYPKYESVSKSQEFFSKFDKICYNLDKGYFEFSFDYKNFGDKAAKGKWTIASFGSRLINFRNSDKNHNWDTREVYPTKELEKLLKDYSIEYGHGECIKAAICGESDKKFFAKLTSVLNTILQMRNSKTGTELDYLISPVADVNGNFFDSRQAPKNMPQDAAANGAYHIGLKGLMLLGRIKNNQEGKKLNLVIKNEEYFEFVQNRNN

SEQ ID NO: 218 - protein, 1052 aa, Staphylococcus aureus
  REGION 1..1052: note = MISC_FEATURE - Exemplary SaCas9 polypeptide sequence
KRNYILGLDIGITSVGYGIIDYETRDVIDAGVRLFKEANVENNEGRRSKRGARRLKRRRRHRIQRVKKLLFDYNLLTDHSELSGINPYEARVKGLSQKLSEEEFSAALLHLAKRRGVHNVNEVEEDTGNELSTKEQISRNSKALEEKYVAELQLERLKKDGEVRGSINRFKTSDYVKEAKQLLKVQKAYHQLDQSFIDTYIDLLETRRTYYEGPGEGSPFGWKDIKEWYEMLMGHCTYFPEELRSVKYAYNADLYNALNDLNNLVITRDENEKLEYYEKFQIIENVFKQKKKPTLKQIAKEILVNEEDIKGYRVTSTGKPEFTNLKVYHDIKDITARKEIIENAELLDQIAKILTIYQSSEDIQEELTNLNSELTQEEIEQISNLKGYTGTHNLSLKAINLILDELWHTNDNQIAIFNRLKLVPKKVDLSQQKEIPTTLVDDFILSPVVKRSFIQSIKVINAIIKKYGLPNDIIIELAREKNSKDAQKMINEMQKRNRQTNERIEEIIRTTGKENAKYLIEKIKLHDMQEGKCLYSLEAIPLEDLLNNPFNYEVDHIIPRSVSFDNSFNNKVLVKQEENSKKGNRTPFQYLSSSDSKISYETFKKHILNLAKGKGRISKTKKEYLLEERDINRFSVQKDFINRNLVDTRYATRGLMNLLRSYFRVNNLDVKVKSINGGFTSFLRRKWKFKKERNKGYKHHAEDALIIANADFIFKEWKKLDKAKKVMENQMFEEKQAESMPEIETEQEYKEIFITPHQIKHIKDFKDYKYSHRVDKKPNRELINDTLYSTRKDDKGNTLIVNNLNGLYDKDNDKLKKLINKSPEKLLMYHHDPQTYQKLKLIMEQYGDEKNPLYKYYEETGNYLTKYSKKDNGPVIKKIKYYGNKLNAHLDITDDYPNSRNKVVKLSLKPYRFDVYLDNGVYKFVTVKNLDVIKKENYYEVNSKCYEEAKKLKKISNQAEFIASFYNNDLIKINGELYRVIGVNNDLLNRIEVNMIDITYREYLENMNDKRPPRIIKTIASKTQSIKKYSTDILGNLYEVKSKKHPQIIKKG

SEQ ID NO: 219 - protein, 1052 aa, Staphylococcus aureus
  REGION 1..1052: note = MISC_FEATURE - SaCas9n polypeptide sequence
KRNYILGLDIGITSVGYGIIDYETRDVIDAGVRLFKEANVENNEGRRSKRGARRLKRRRRHRIQRVKKLLFDYNLLTDHSELSGINPYEARVKGLSQKLSEEEFSAALLHLAKRRGVHNVNEVEEDTGNELSTKEQISRNSKALEEKYVAELQLERLKKDGEVRGSINRFKTSDYVKEAKQLLKVQKAYHQLDQSFIDTYIDLLETRRTYYEGPGEGSPFGWKDIKEWYEMLMGHCTYFPEELRSVKYAYNADLYNALNDLNNLVITRDENEKLEYYEKFQIIENVFKQKKKPTLKQIAKEILVNEEDIKGYRVTSTGKPEFTNLKVYHDIKDITARKEIIENAELLDQIAKILTIYQSSEDIQEELTNLNSELTQEEIEQISNLKGYTGTHNLSLKAINLILDELWHTNDNQIAIFNRLKLVPKKVDLSQQKEIPTTLVDDFILSPVVKRSFIQSIKVINAIIKKYGLPNDIIIELAREKNSKDAQKMINEMQKRNRQTNERIEEIIRTTGKENAKYLIEKIKLHDMQEGKCLYSLEAIPLEDLLNNPFNYEVDHIIPRSVSFDNSFNNKVLVKQEEASKKGNRTPFQYLSSSDSKISYETFKKHILNLAKGKGRISKTKKEYLLEERDINRFSVQKDFINRNLVDTRYATRGLMNLLRSYFRVNNLDVKVKSINGGFTSFLRRKWKFKKERNKGYKHHAEDALIIANADFIFKEWKKLDKAKKVMENQMFEEKQAESMPEIETEQEYKEIFITPHQIKHIKDFKDYKYSHRVDKKPNRELINDTLYSTRKDDKGNTLIVNNLNGLYDKDNDKLKKLINKSPEKLLMYHHDPQTYQKLKLIMEQYGDEKNPLYKYYEETGNYLTKYSKKDNGPVIKKIKYYGNKLNAHLDITDDYPNSRNKVVKLSLKPYRFDVYLDNGVYKFVTVKNLDVIKKENYYEVNSKCYEEAKKLKKISNQAEFIASFYNNDLIKINGELYRVIGVNNDLLNRIEVNMIDITYREYLENMNDKRPPRIIKTIASKTQSIKKYSTDILGNLYEVKSKKHPQIIKKG

SEQ ID NO: 220 - protein, 1052 aa, Staphylococcus aureus
  REGION 1..1052: note = MISC_FEATURE - SaKKH Cas9 polypeptide sequence
KRNYILGLDIGITSVGYGIIDYETRDVIDAGVRLFKEANVENNEGRRSKRGARRLKRRRRHRIQRVKKLLFDYNLLTDHSELSGINPYEARVKGLSQKLSEEEFSAALLHLAKRRGVHNVNEVEEDTGNELSTKEQISRNSKALEEKYVAELQLERLKKDGEVRGSINRFKTSDYVKEAKQLLKVQKAYHQLDQSFIDTYIDLLETRRTYYEGPGEGSPFGWKDIKEWYEMLMGHCTYFPEELRSVKYAYNADLYNALNDLNNLVITRDENEKLEYYEKFQIIENVFKQKKKPTLKQIAKEILVNEEDIKGYRVTSTGKPEFTNLKVYHDIKDITARKEIIENAELLDQIAKILTIYQSSEDIQEELTNLNSELTQEEIEQISNLKGYTGTHNLSLKAINLILDELWHTNDNQIAIFNRLKLVPKKVDLSQQKEIPTTLVDDFILSPVVKRSFIQSIKVINAIIKKYGLPNDIIIELAREKNSKDAQKMINEMQKRNRQTNERIEEIIRTTGKENAKYLIEKIKLHDMQEGKCLYSLEAIPLEDLLNNPFNYEVDHIIPRSVSFDNSFNNKVLVKQEEASKKGNRTPFQYLSSSDSKISYETFKKHILNLAKGKGRISKTKKEYLLEERDINRFSVQKDFINRNLVDTRYATRGLMNLLRSYFRVNNLDVKVKSINGGFTSFLRRKWKFKKERNKGYKHHAEDALIIANADFIFKEWKKLDKAKKVMENQMFEEKQAESMPEIETEQEYKEIFITPHQIKHIKDFKDYKYSHRVDKKPNRKLINDTLYSTRKDDKGNTLIVNNLNGLYDKDNDKLKKLINKSPEKLLMYHHDPQTYQKLKLIMEQYGDEKNPLYKYYEETGNYLTKYSKKDNGPVIKKIKYYGNKLNAHLDITDDYPNSRNKVVKLSLKPYRFDVYLDNGVYKFVTVKNLDVIKKENYYEVNSKCYEEAKKLKKISNQAEFIASFYKNDLIKINGELYRVIGVNNDLLNRIEVNMIDITYREYLENMNDKRPPHIIKTIASKTQSIKKYSTDILGNLYEVKSKKHPQIIKKG

SEQ ID NO: 221 - protein, 707 aa, synthetic construct
  REGION 1..707: note = Casphi-1 polypeptide sequence
MADTPTLFTQFLRHHLPGQRFRKDILKQAGRILANKGEDATIAFLRGKSEESPPDFQPPVKCPIIACSRPLTEWPIYQASVAIQGYVYGQSLAEFEASDPGCSKDGLLGWFDKTGVCTDYFSVQGLNLIFQNARKRYIGVQTKVTNRNEKRHKKLKRINAKRIAEGLPELTSDEPESALDETGHLIDPPGLNTNIYCYQQVSPKPLALSEVNQLPTAYAGYSTSGDDPIQPMVTKDRLSISKGQPGYIPEHQRALLSQKKHRRMRGYGLKARALLVIVRIQDDWAVIDLRSLLRNAYWRRIVQTKEPSTITKLLKLVTGDPVLDATRMVATFTYKPGIVQVRSAKCLKNKQGSKLFSERYLNETVSVTSIDLGSNNLVAVATYRLVNGNTPELLQRFTLPSHLVKDFERYKQAHDTLEDSIQKTAVASLPQGQQTEIRMWSMYGFREAQERVCQELGLADGSIPWNVMTATSTILTDLFLARGGDPKKCMFTSEPKKKKNSKQVLYKIRDRAWAKMYRTLLSKETREAWNKALWGLKRGSPDYARLSKRKEELARRCVNYTISTAEKRAQCGRTIVALEDLNIGFFHGRGKQEPGWVGLFTRKKENRWLMQALHKAFLELAHHRGYHVIEVNPAYTSQTCPVCRHCDPDNRDQHNREAFHCIGCGFRGNADLDVATHNIAMVAITGESLKRARGSVASKTPQPLAAE

SEQ ID NO: 222 - protein, 757 aa, synthetic construct
  REGION 1..757: note = Casphi-2 polypeptide sequence
MPKPAVESEFSKVLKKHFPGERFRSSYMKRGGKILAAQGEEAVVAYLQGKSEEEPPNFQPPAKCHVVTKSRDFAEWPIMKASEAIQRYIYALSTTERAACKPGKSSESHAAWFAATGVSNHGYSHVQGLNLIFDHTLGRYDGVLKKVQLRNEKARARLESINASRADEGLPEIKAEEEEVATNETGHLLQPPGINPSFYVYQTISPQAYRPRDEIVLPPEYAGYVRDPNAPIPLGVVRNRCDIQKGCPGYIPEWQREAGTAISPKTGKAVTVPGLSPKKNKRMRRYWRSEKEKAQDALLVTVRIGTDWVVIDVRGLLRNARWRTIAPKDISLNALLDLFTGDPVIDVRRNIVTFTYTLDACGTYARKWTLKGKQTKATLDKLTATQTVALVAIDLGQTNPISAGISRVTQENGALQCEPLDRFTLPDDLLKDISAYRIAWDRNEEELRARSVEALPEAQQAEVRALDGVSKETARTQLCADFGLDPKRLPWDKMSSNTTFISEALLSNSVSRDQVFFTPAPKKGAKKKAPVEVMRKDRTWARAYKPRLSVEAQKLKNEALWALKRTSPEYLKLSRRKEELCRRSINYVIEKTRRRTQCQIVIPVIEDLNVRFFHGSGKRLPGWDNFFTAKKENRWFIQGLHKAFSDLRTHRSFYVFEVRPERTSITCPKCGHCEVGNRDGEAFQCLSCGKTCNADLDVATHNLTQVALTGKTMPKREEPRDAQGTAPARKTKKASKSKAPPAEREDQTPAQEPSQTS

SEQ ID NO: 223 - protein, 766 aa, synthetic construct
  REGION 1..766: note = Casphi-3 polypeptide sequence
MEKEITELTKIRREFPNKKFSSTDMKKAGKLLKAEGPDAVRDFLNSCQEIIGDFKPPVKTNIVSISRPFEEWPVSMVGRAIQEYYFSLTKEELESVHPGTSSEDHKSFFNITGLSNYNYTSVQGLNLIFKNAKAIYDGTLVKANNKNKKLEKKFNEINHKRSLEGLPIITPDFEEPFDENGHLNNPPGINRNIYGYQGCAAKVFVPSKHKMVSLPKEYEGYNRDPNLSLAGFRNRLEIPEGEPGHVPWFQRMDIPEGQIGHVNKIQRFNFVHGKNSGKVKFSDKTGRVKRYHHSKYKDATKPYKFLEESKKVSALDSILAIITIGDDWVVFDIRGLYRNVFYRELAQKGLTAVQLLDLFTGDPVIDPKKGVVTFSYKEGVVPVFSQKIVPRFKSRDTLEKLTSQGPVALLSVDLGQNEPVAARVCSLKNINDKITLDNSCRISFLDDYKKQIKDYRDSLDELEIKIRLEAINSLETNQQVEIRDLDVFSADRAKANTVDMFDIDPNLISWDSMSDARVSTQISDLYLKNGGDESRVYFEINNKRIKRSDYNISQLVRPKLSDSTRKNLNDSIWKLKRTSEEYLKLSKRKLELSRAVVNYTIRQSKLLSGINDIVIILEDLDVKKKFNGRGIRDIGWDNFFSSRKENRWFIPAFHKAFSELSSNRGLCVIEVNPAWTSATCPDCGFCSKENRDGINFTCRKCGVSYHADIDVATLNIARVAVLGKPMSGPADRERLGDTKKPRVARSRKTMKRKDISNSTVEAMVTA

SEQ ID NO: 224 - protein, 765 aa, synthetic construct
  REGION 1..765: note = Casphi-4 polypeptide sequence
MYSLEMADLKSEPSLLAKLLRDRFPGKYWLPKYWKLAEKKRLTGGEEAACEYMADKQLDSPPPNFRPPARCVILAKSRPFEDWPVHRVASKAQSFVIGLSEQGFAALRAAPPSTADARRDWLRSHGASEDDLMALEAQLLETIMGNAISLHGGVLKKIDNANVKAAKRLSGRNEARLNKGLQELPPEQEGSAYGADGLLVNPPGLNLNIYCRKSCCPKPVKNTARFVGHYPGYLRDSDSILISGTMDRLTIIEGMPGHIPAWQREQGLVKPGGRRRRLSGSESNMRQKVDPSTGPRRSTRSGTVNRSNQRTGRNGDPLLVEIRMKEDWVLLDARGLLRNLRWRESKRGLSCDHEDLSLSGLLALFSGDPVIDPVRNEVVFLYGEGIIPVRSTKPVGTRQSKKLLERQASMGPLTLISCDLGQTNLIAGRASAISLTHGSLGVRSSVRIELDPEIIKSFERLRKDADRLETEILTAAKETLSDEQRGEVNSHEKDSPQTAKASLCRELGLHPPSLPWGQMGPSTTFIADMLISHGRDDDAFLSHGEFPTLEKRKKFDKRFCLESRPLLSSETRKALNESLWEVKRTSSEYARLSQRKKEMARRAVNFVVEISRRKTGLSNVIVNIEDLNVRIFHGGGKQAPGWDGFFRPKSENRWFIQAIHKAFSDLAAHHGIPVIESDPQRTSMTCPECGHCDSKNRNGVRFLCKGCGASMDADFDAACRNLERVALTGKPMPKPSTSCERLLSATTGKVCSDHSLSHDAIEKAS

SEQ ID NO: 225 - protein, 793 aa, synthetic construct
  REGION 1..793: note = Casphi-5 polypeptide sequence
MSSLPTPLELLKQKHADLFKGLQFSSKDNKMAGKVLKKDGEEAALAFLSERGVSRGELPNFRPPAKTLVVAQSRPFEEFPIYRVSEAIQLYVYSLSVKELETVPSGSSTKKEHQRFFQDSSVPDFGYTSVQGLNKIFGLARGIYLGVITRGENQLQKAKSKHEALNKKRRASGEAETEFDPTPYEYMTPERKLAKPPGVNHSIMCYVDISVDEFDFRNPDGIVLPSEYAGYCREINTAIEKGTVDRLGHLKGGPGYIPGHQRKESTTEGPKINFRKGRIRRSYTALYAKRDSRRVRQGKLALPSYRHHMMRLNSNAESAILAVIFFGKDWVVFDLRGLLRNVRWRNLFVDGSTPSTLLGMFGDPVIDPKRGVVAFCYKEQIVPVVSKSITKMVKAPELLNKLYLKSEDPLVLVAIDLGQTNPVGVGVYRVMNASLDYEVVTRFALESELLREIESYRQRTNAFEAQIRAETFDAMTSEEQEEITRVRAFSASKAKENVCHRFGMPVDAVDWATMGSNTIHIAKWVMRHGDPSLVEVLEYRKDNEIKLDKNGVPKKVKLTDKRIANLTSIRLRFSQETSKHYNDTMWELRRKHPVYQKLSKSKADFSRRVVNSIIRRVNHLVPRARIVFIIEDLKNLGKVFHGSGKRELGWDSYFEPKSENRWFIQVLHKAFSETGKHKGYYIIECWPNWTSCTCPKCSCCDSENRHGEVFRCLACGYTCNTDFGTAPDNLVKIATTGKGLPGPKKRCKGSSKGKNPKIARSSETGVSVTESGAPKVKKSSPTQTSQSSSQSAP

SEQ ID NO: 226 - protein, 441 aa, synthetic construct
  REGION 1..441: note = Casphi-6 polypeptide sequence
MNKIEKEKTPLAKLMNENFAGLRFPFAIIKQAGKKLLKEGELKTIEYMTGKGSIEPLPNFKPPVKCLIVAKRRDLKYFPICKASCEIQSYVYSLNYKDFMDYFSTPMTSQKQHEEFFKKSGLNIEYQNVAGLNLIFNNVKNTYNGVILKVKNRNEKLKKKAIKNNYEFEEIKTFNDDGCLINKPGINNVIYCFQSISPKILKNITHLPKEYNDYDCSVDRNIIQKYVSRLDIPESQPGHVPEWQRKLPEFNNTNNPRRRRKWYSNGRNISKGYSVDQVNQAKIEDSLLAQIKIGEDWIILDIRGLLRDLNRRELISYKNKLTIKDVLGFFSDYPIIDIKKNLVTFCYKEGVIQVVSQKSIGNKKSKQLLEKLIENKPIALVSIDLGQTNPVSVKISKLNKINNKISIESFTYRFLNEEILKEIEKYRKDYDKLELKLINEA

SEQ ID NO: 227 - protein, 772 aa, synthetic construct
  REGION 1..772: note = Casphi-7 polypeptide sequence
MSNTAVSTREHMSNKTTPPSPLSLLLRAHFPGLKFESQDYKIAGKKLRDGGPEAVISYLTGKGQAKLKDVKPPAKAFVIAQSRPFIEWDLVRVSRQIQEKIFGIPATKGRPKQDGLSETAFNEAVASLEVDGKSKLNEETRAAFYEVLGLDAPSLHAQAQNALIKSAISIREGVLKKVENRNEKNLSKTKRRKEAGEEATFVEEKAHDERGYLIHPPGVNQTIPGYQAVVIKSCPSDFIGLPSGCLAKESAEALTDYLPHDRMTIPKGQPGYVPEWQHPLLNRRKNRRRRDWYSASLNKPKATCSKRSGTPNRKNSRTDQIQSGRFKGAIPVLMRFQDEWVIIDIRGLLRNARYRKLLKEKSTIPDLLSLFTGDPSIDMRQGVCTFIYKAGQACSAKMVKTKNAPEILSELTKSGPVVLVSIDLGQTNPIAAKVSRVTQLSDGQLSHETLLRELLSNDSSDGKEIARYRVASDRLRDKLANLAVERLSPEHKSEILRAKNDTPALCKARVCAALGLNPEMIAWDKMTPYTEFLATAYLEKGGDRKVATLKPKNRPEMLRRDIKFKGTEGVRIEVSPEAAEAYREAQWDLQRTSPEYLRLSTWKQELTKRILNQLRHKAAKSSQCEVVVMAFEDLNIKMMHGNGKWADGGWDAFFIKKRENRWFMQAFHKSLTELGAHKGVPTIEVTPHRTSITCTKCGHCDKANRDGERFACQKCGFVAHADLEIATDNIERVALTGKPMPKPESERSGDAKKSVGARKAAFKPEEDAEAAE

SEQ ID NO: 228 - protein, 717 aa, synthetic construct
  REGION 1..717: note = Casphi-8 polypeptide sequence
MIKPTVSQFLTPGFKLIRNHSRTAGLKLKNEGEEACKKFVRENEIPKDECPNFQGGPAIANIIAKSREFTEWEIYQSSLAIQEVIFTLPKDKLPEPILKEEWRAQWLSEHGLDTVPYKEAAGLNLIIKNAVNTYKGVQVKVDNKNKNNLAKINRKNEIAKLNGEQEISFEEIKAFDDKGYLLQKPSPNKSIYCYQSVSPKPFITSKYHNVNLPEEYIGYYRKSNEPIVSPYQFDRLRIPIGEPGYVPKWQYTFLSKKENKRRKLSKRIKNVSPILGIICIKKDWCVFDMRGLLRTNHWKKYHKPTDSINDLFDYFTGDPVIDTKANVVRFRYKMENGIVNYKPVREKKGKELLENICDQNGSCKLATVDVGQNNPVAIGLFELKKVNGELTKTLISRHPTPIDFCNKITAYRERYDKLESSIKLDAIKQLTSEQKIEVDNYNNNFTPQNTKQIVCSKLNINPNDLPWDKMISGTHFISEKAQVSNKSEIYFTSTDKGKTKDVMKSDYKWFQDYKPKLSKEVRDALSDIEWRLRRESLEFNKLSKSREQDARQLANWISSMCDVIGIENLVKKNNFFGGSGKREPGWDNFYKPKKENRWWINAIHKALTELSQNKGKRVILLPAMRTSITCPKCKYCDSKNRNGEKFNCLKCGIELNADIDVATENLATVAITAQSMPKPTCERSGDAKKPVRARKAKAPEFHDKLAPSYTVVLREAV

SEQ ID NO: 229 - protein, 793 aa, synthetic construct
  REGION 1..793: note = Casphi-9 polypeptide sequence
MRSSREIGDKILMRQPAEKTAFQVFRQEVIGTQKLSGGDAKTAGRLYKQGKMEAAREWLLKGARDDVPPNFQPPAKCLVVAVSHPFEEWDISKTNHDVQAYIYAQPLQAEGHLNGLSEKWEDTSADQHKLWFEKTGVPDRGLPVQAINKIAKAAVNRAFGVVRKVENRNEKRRSRDNRIAEHNRENGLTEVVREAPEVATNADGFLLHPPGIDPSILSYASVSPVPYNSSKHSFVRLPEEYQAYNVEPDAPIPQFVVEDRFAIPPGQPGYVPEWQRLKCSTNKHRRMRQWSNQDYKPKAGRRAKPLEFQAHLTRERAKGALLVVMRIKEDWVVFDVRGLLRNVEWRKVLSEEAREKLTLKGLLDLFTGDPVIDTKRGIVTFLYKAEITKILSKRTVKTKNARDLLLRLTEPGEDGLRREVGLVAVDLGQTHPIAAAIYRIGRTSAGALESTVLHRQGLREDQKEKLKEYRKRHTALDSRLRKEAFETLSVEQQKEIVTVSGSGAQITKDKVCNYLGVDPSTLPWEKMGSYTHFISDDFLRRGGDPNIVHFDRQPKKGKVSKKSQRIKRSDSQWVGRMRPRLSQETAKARMEADWAAQNENEEYKRLARSKQELARWCVNTLLQNTRCITQCDEIVVVIEDLNVKSLHGKGAREPGWDNFFTPKTENRWFIQILHKTFSELPKHRGEHVIEGCPLRTSITCPACSYCDKNSRNGEKFVCVACGATFHADFEVATYNLVRLATTGMPMPKSLERQGGGEKAGGARKARKKAKQVEKIVVQANANVTMNGASLHSP

SEQ ID NO: 230 - protein, 812 aa, synthetic construct
  REGION 1..812: note = Casphi-10 polypeptide sequence
MDMLDTETNYATETPAQQQDYSPKPPKKAQRAPKGFSKKARPEKKPPKPITLFTQKHFSGVRFLKRVIRDASKILKLSESRTITFLEQAIERDGSAPPDVTPPVHNTIMAVTRPFEEWPEVILSKALQKHCYALTKKIKIKTWPKKGPGKKCLAAWSARTKIPLIPGQVQATNGLFDRIGSIYDGVEKKVTNRNANKKLEYDEAIKEGRNPAVPEYETAYNIDGTLINKPGYNPNLYITQSRTPRLITEADRPLVEKILWQMVEKKTQSRNQARRARLEKAAHLQGLPVPKFVPEKVDRSQKIEIRIIDPLDKIEPYMPQDRMAIKASQDGHVPYWQRPFLSKRRNRRVRAGWGKQVSSIQAWLTGALLVIVRLGNEAFLADIRGALRNAQWRKLLKPDATYQSLFNLFTGDPVVNTRTNHLTMAYREGVVNIVKSRSFKGRQTREHLLTLLGQGKTVAGVSFDLGQKHAAGLLAAHFGLGEDGNPVFTPIQACFLPQRYLDSLTNYRNRYDALTLDMRRQSLLALTPAQQQEFADAQRDPGGQAKRACCLKLNLNPDEIRWDLVSGISTMISDLYIERGGDPRDVHQQVETKPKGKRKSEIRILKIRDGKWAYDFRPKIADETRKAQREQLWKLQKASSEFERLSRYKINIARAIANWALQWGRELSGCDIVIPVLEDLNVGSKFFDGKGKWLLGWDNRFTPKKENRWFIKVLHKAVAELAPHRGVPVYEVMPHRTSMTCPACHYCHPTNREGDRFECQSCHVVKNTDRDVAPYNILRVAVEGKTLDRWQAEKKPQAEPDRPMILIDNQES

SEQ ID NO: 231 - protein, 84 aa, synthetic construct
  REGION 1..84: note = synthetic polypeptide sequence
MTNLSDIIEKETGKQLVIQESILMLPEEVEEVIGNKPESDILVHTAYDESTDENVMLLTSDAPEYKPWALVIQDSNGENKIKML

SEQ ID NO: 232 - protein, 1129 aa, Alicyclobacillus acidoterrestris
  REGION 1..1129: note = MISC_FEATURE - Cas12b/C2c1; sp|T0D7A2|C2C1_ALIAG CRISPR-associated endonuclease C2c1 OS = Alicyclobacillus acido-terrestris (strain ATCC 49025 /DSM 3922/ CIP 106132 / NCIMB 13137/GD3B) GN=c2c1 PE=1 SV=1; Cas12b/C2c1 polypeptide sequence
MAVKSIKVKLRLDDMPEIRAGLWKLHKEVNAGVRYYTEWLSLLRQENLYRRSPNGDGEQECDKTAEECKAELLERLRARQVENGHRGPAGSDDELLQLARQLYELLVPQAIGAKGDAQQIARKFLSPLADKDAVGGLGIAKAGNKPRWVRMREAGEPGWEEEKEKAETRKSADRTADVLRALADFGLKPLMRVYTDSEMSSVEWKPLRKGQAVRTWDRDMFQQAIERMMSWESWNQRVGQEYAKLVEQKNRFEQKNFVGQEHLVHLVNQLQQDMKEASPGLESKEQTAHYVTGRALRGSDKVFEKWGKLAPDAPFDLYDAEIKNVQRRNTRRFGSHDLFAKLAEPEYQALWREDASFLTRYAVYNSILRKLNHAKMFATFTLPDATAHPIWTRFDKLGGNLHQYTFLFNEFGERRHAIRFHKLLKVENGVAREVDDVTVPISMSEQLDNLLPRDPNEPIALYFRDYGAEQHFTGEFGGAKIQCRRDQLAHMHRRRGARDVYLNVSVRVQSQSEARGERRPPYAAVFRLVGDNHRAFVHFDKLSDYLAEHPDDGKLGSEGLLSGLRVMSVDLGLRTSASISVFRVARKDELKPNSKGRVPFFFPIKGNDNLVAVHERSQLLKLPGETESKDLRAIREERQRTLRQLRTQLAYLRLLVRCGSEDVGRRERSWAKLIEQPVDAANHMTPDWREAFENELQKLKSLHGICSDKEWMDAVYESVRRVWRHMGKQVRDWRKDVRSGERPKIRGYAKDVVGGNSIEQIEYLERQYKFLKSWSFFGKVSGQVIRAEKGSRFAITLREHIDHAKEDRLKKLADRIIMEALGYVYALDERGKGKWVAKYPPCQLILLEELSEYQFNNDRPPSENNQLMQWSHRGVFQELINQAQVHDLLVGTMYAAFSSRFDARTGAPGIRCRRVPARCTQEHNPEPFPWWLNKFVVEHTLDACPLRADDLIPTGEGEIFVSPFSAEEGDFHQIHADLNAAQNLQQRLWSDFDISQIRLRCDWGEVDGELVLIPRLTGKRTADSYSNKVFYTNTGVTYYERERGKKRRKVFAQEKLSEEEAELLVEADEAREKSVVLMRDPSGIINRGNWTRQKEFWSMVNQRIEGYLVKQIRSRVPLQDSACENTGDI

SEQ ID NO: 233 - protein, 1368 aa, Mus musculus
  REGION 1..1368: note = MISC_FEATURE - high fidelity Cas9 polypeptide sequence
MDKKYSIGLAIGTNSVGWAVITDEYKVPSKKFKVLGNTDRHSIKKNLIGALLFDSGETAEATRLKRTARRRYTRRKNRICYLQEIFSNEMAKVDDSFFHRLEESFLVEEDKKHERHPIFGNIVDEVAYHEKYPTIYHLRKKLVDSTDKADLRLIYLALAHMIKFRGHFLIEGDLNPDNSDVDKLFIQLVQTYNQLFEENPINASGVDAKAILSARLSKSRRLENLIAQLPGEKKNGLFGNLIALSLGLTPNFKSNFDLAEDAKLQLSKDTYDDDLDNLLAQIGDQYADLFLAAKNLSDAILLSDILRVNTEITKAPLSASMIKRYDEHHQDLTLLKALVRQQLPEKYKEIFFDQSKNGYAGYIDGGASQEEFYKFIKPILEKMDGTEELLVKLNREDLLRKQRTFDNGSIPHQIHLGELHAILRRQEDFYPFLKDNREKIEKILTFRIPYYVGPLARGNSRFAWMTRKSEETITPWNFEEVVDKGASAQSFIERMTAFDKNLPNEKVLPKHSLLYEYFTVYNELTKVKYVTEGMRKPAFLSGEQKKAIVDLLFKTNRKVTVKQLKEDYFKKIECFDSVEISGVEDRFNASLGTYHDLLKIIKDKDFLDNEENEDILEDIVLTLTLFEDREMIEERLKTYAHLFDDKVMKQLKRRRYTGWGALSRKLINGIRDKQSGKTILDFLKSDGFANRNFMALIHDDSLTFKEDIQKAQVSGQGDSLHEHIANLAGSPAIKKGILQTVKVVDELVKVMGRHKPENIVIEMARENQTTQKGQKNSRERMKRIEEGIKELGSQILKEHPVENTQLQNEKLYLYYLQNGRDMYVDQELDINRLSDYDVDHIVPQSFLKDDSIDNKVLTRSDKNRGKSDNVPSEEVVKKMKNYWRQLLNAKLITQRKFDNLTKAERGGLSELDKAGFIKRQLVETRAITKHVAQILDSRMNTKYDENDKLIREVKVITLKSKLVSDFRKDFQFYKVREINNYHHAHDAYLNAVVGTALIKKYPKLESEFVYGDYKVYDVRKMIAKSEQEIGKATAKYFFYSNIMNFFKTEITLANGEIRKRPLIETNGETGEIVWDKGRDFATVRKVLSMPQVNIVKKTEVQTGGFSKESILPKRNSDKLIARKKDWDPKKYGGFDSPTVAYSVLVVAKVEKGKSKKLKSVKELLGITIMERSSFEKNPIDFLEAKGYKEVKKDLIIKLPKYSLFELENGRKRMLASAGELQKGNELALPSKYVNFLYLASHYEKLKGSPEDNEQKQLFVEQHKHYLDEIIEQISEFSKRVILADANLDKVLSAYNKHRDKPIREQAENIIHLFTLTNLGAPAAFKYFDTTIDRKRYTSTKEVLDATLIHQSITGLYETRIDLSQLGGD

SEQ ID NO: 234 - protein, 1368 aa, Streptococcus pyogenes
  REGION 1..1368: note = MISC_FEATURE - PAM-binding SpEQR Cas9 polypeptide sequence
MDKKYSIGLAIGTNSVGWAVITDEYKVPSKKFKVLGNTDRHSIKKNLIGALLFDSGETAEATRLKRTARRRYTRRKNRICYLQEIFSNEMAKVDDSFFHRLEESVLVEEDKKHERHPIFGNIVDEVAYHEKYPTIYHLRKKLVDSTDKADLRLIYLALAHMIKFRGHFLIEGDLNPDNSDVDKLFIQLVQTYNQLFEENPINASGVDAKAILSARLSKSRRLENLIAQLPGEKKNGLFGNLIALSLGLTPNFKSNFDLAEDAKLQLSKDTYDDDLDNLLAQIGDQYADLFLAAKNLSDAILLSDILRVNTEITKAPLSASMIKRYDEHHQDLTLLKALVRQQLPEKYKEIFFDQSKNGYAGYIDGGASQEEFYKFIKPILEKMDGTEELLVKLNREDLLRKQRTFDNGSIPHQIHLGELHAILRRQEDFYPFLKDNREKIEKILTFRIPYYVGPLARGNSRFAWMTRKSEETITPWNFEEVVDKGASAQSFIERMTNFDKNLPNEKVLPKHSLLYEYFTVYNELTKVKYVTEGMRKPAFLSGEQKKAIVDLLFKTNRKVTVKQLKEDYFKKIECFDSVEISGVEDRFNASLGTYHDLLKIIKDKDFLDNEENEDILEDIVLTLTLFEDREMIEERLKTYAHLFDDKVMKQLKRRRYTGWGRLSRKLINGIRDKQSGKTILDFLKSDGFANRNFMQLIHDDSLTFKEDIQKAQVSGQGDSLHEHIANLAGSPAIKKGILQTVKVVDELVKVMGRHKPENIVIEMARENQTTQKGQKNSRERMKRIEEGIKELGSQILKEHPVENTQLQNEKLYLYYLQNGRDMYVDQELDINRLSDYDVDHIVPQSFLKDDSIDNKVLTRSDKNRGKSDNVPSEEVVKKMKNYWRQLLNAKLITQRKFDNLTKAERGGLSELDKAGFIKRQLVETRQITKHVAQILDSRMNTKYDENDKLIREVKVITLKSKLVSDFRKDFQFYKVREINNYHHAHDAYLNAVVGTALIKKYPKLESEFVYGDYKVYDVRKMIAKSEQEIGKATAKYFFYSNIMNFFKTEITLANGEIRKRPLIETNGETGEIVWDKGRDFATVRKVLSMPQVNIVKKTEVQTGGFSKESILPKRNSDKLIARKKDWDPKKYGGFESPTVAYSVLVVAKVEKGKSKKLKSVKELLGITIMERSSFEKNPIDFLEAKGYKEVKKDLIIKLPKYSLFELENGRKRMLASAGELQKGNELALPSKYVNFLYLASHYEKLKGSPEDNEQKQLFVEQHKHYLDEIIEQISEFSKRVILADANLDKVLSAYNKHRDKPIREQAENIIHLFTLTNLGAPAAFKYFDTTIDRKQYRSTKEVLDATLIHQSITGLYETRIDLSQLGGD

SEQ ID NO: 235 - protein, 1368 aa, Streptococcus pyogenes
  REGION 1..1368: note = MISC_FEATURE - PAM-binding SpVQR Cas9 polypeptide sequence
MDKKYSIGLAIGTNSVGWAVITDEYKVPSKKFKVLGNTDRHSIKKNLIGALLFDSGETAEATRLKRTARRRYTRRKNRICYLQEIFSNEMAKVDDSFFHRLEESFLVEEDKKHERHPIFGNIVDEVAYHEKYPTIYHLRKKLVDSTDKADLRLIYLALAHMIKFRGHFLIEGDLNPDNSDVDKLFIQLVQTYNQLFEENPINASGVDAKAILSARLSKSRRLENLIAQLPGEKKNGLFGNLIALSLGLTPNFKSNFDLAEDAKLQLSKDTYDDDLDNLLAQIGDQYADLFLAAKNLSDAILLSDILRVNTEITKAPLSASMIKRYDEHHQDLTLLKALVRQQLPEKYKEIFFDQSKNGYAGYIDGGASQEEFYKFIKPILEKMDGTEELLVKLNREDLLRKQRTFDNGSIPHQIHLGELHAILRRQEDFYPFLKDNREKIEKILTFRIPYYVGPLARGNSRFAWMTRKSEETITPWNFEEVVDKGASAQSFIERMTNFDKNLPNEKVLPKHSLLYEYFTVYNELTKVKYVTEGMRKPAFLSGEQKKAIVDLLFKTNRKVTVKQLKEDYFKKIECFDSVEISGVEDRFNASLGTYHDLLKIIKDKDFLDNEENEDILEDIVLTLTLFEDREMIEERLKTYAHLFDDKVMKQLKRRRYTGWGRLSRKLINGIRDKQSGKTILDFLKSDGFANRNFMQLIHDDSLTFKEDIQKAQVSGQGDSLHEHIANLAGSPAIKKGILQTVKVVDELVKVMGRHKPENIVIEMARENQTTQKGQKNSRERMKRIEEGIKELGSQILKEHPVENTQLQNEKLYLYYLQNGRDMYVDQELDINRLSDYDVDHIVPQSFLKDDSIDNKVLTRSDKNRGKSDNVPSEEVVKKMKNYWRQLLNAKLITQRKFDNLTKAERGGLSELDKAGFIKRQLVETRQITKHVAQILDSRMNTKYDENDKLIREVKVITLKSKLVSDFRKDFQFYKVREINNYHHAHDAYLNAVVGTALIKKYPKLESEFVYGDYKVYDVRKMIAKSEQEIGKATAKYFFYSNIMNFFKTEITLANGEIRKRPLIETNGETGEIVWDKGRDFATVRKVLSMPQVNIVKKTEVQTGGFSKESILPKRNSDKLIARKKDWDPKKYGGFVSPTVAYSVLVVAKVEKGKSKKLKSVKELLGITIMERSSFEKNPIDFLEAKGYKEVKKDLIIKLPKYSLFELENGRKRMLASAGELQKGNELALPSKYVNFLYLASHYEKLKGSPEDNEQKQLFVEQHKHYLDEIIEQISEFSKRVILADANLDKVLSAYNKHRDKPIREQAENIIHLFTLTNLGAPAAFKYFDTTIDRKQYRSTKEVLDATLIHQSITGLYETRIDLSQLGGD

SEQ ID NO: 236 - protein, 1368 aa, Streptococcus pyogenes
  REGION 1..1368: note = MISC_FEATURE - SpVQR Cas9 polypeptide sequence
MDKKYSIGLAIGTNSVGWAVITDEYKVPSKKFKVLGNTDRHSIKKNLIGALLFDSGETAEATRLKRTARRRYTRRKNRICYLQEIFSNEMAKVDDSFFHRLEESFLVEEDKKHERHPIFGNIVDEVAYHEKYPTIYHLRKKLVDSTDKADLRLIYLALAHMIKFRGHFLIEGDLNPDNSDVDKLFIQLVQTYNQLFEENPINASGVDAKAILSARLSKSRRLENLIAQLPGEKKNGLFGNLIALSLGLTPNFKSNFDLAEDAKLQLSKDTYDDDLDNLLAQIGDQYADLFLAAKNLSDAILLSDILRVNTEITKAPLSASMIKRYDEHHQDLTLLKALVRQQLPEKYKEIFFDQSKNGYAGYIDGGASQEEFYKFIKPILEKMDGTEELLVKLNREDLLRKQRTFDNGSIPHQIHLGELHAILRRQEDFYPFLKDNREKIEKILTFRIPYYVGPLARGNSRFAWMTRKSEETITPWNFEEVVDKGASAQSFIERMTNFDKNLPNEKVLPKHSLLYEYFTVYNELTKVKYVTEGMRKPAFLSGEQKKAIVDLLFKTNRKVTVKQLKEDYFKKIECFDSVEISGVEDRFNASLGTYHDLLKIIKDKDFLDNEENEDILEDIVLTLTLFEDREMIEERLKTYAHLFDDKVMKQLKRRRYTGWGRLSRKLINGIRDKQSGKTILDFLKSDGFANRNFMQLIHDDSLTFKEDIQKAQVSGQGDSLHEHIANLAGSPAIKKGILQTVKVVDELVKVMGRHKPENIVIEMARENQTTQKGQKNSRERMKRIEEGIKELGSQILKEHPVENTQLQNEKLYLYYLQNGRDMYVDQELDINRLSDYDVDHIVPQSFLKDDSIDNKVLTRSDKNRGKSDNVPSEEVVKKMKNYWRQLLNAKLITQRKFDNLTKAERGGLSELDKAGFIKRQLVETRQITKHVAQILDSRMNTKYDENDKLIREVKVITLKSKLVSDFRKDFQFYKVREINNYHHAHDAYLNAVVGTALIKKYPKLESEFVYGDYKVYDVRKMIAKSEQEIGKATAKYFFYSNIMNFFKTEITLANGEIRKRPLIETNGETGEIVWDKGRDFATVRKVLSMPQVNIVKKTEVQTGGFSKESILPKRNSDKLIARKKDWDPKKYGGFVSPTVAYSVLVVAKVEKGKSKKLKSVKELLGITIMERSSFEKNPIDFLEAKGYKEVKKDLIIKLPKYSLFELENGRKRMLASARELQKGNELALPSKYVNFLYLASHYEKLKGSPEDNEQKQLFVEQHKHYLDEIIEQISEFSKRVILADANLDKVLSAYNKHRDKPIREQAENIIHLFTLTNLGAPAAFKYFDTTIDRKEYRSTKEVLDATLIHQSITGLYETRIDLSQLGGD

SEQ ID NO: 237 - protein, 1359 aa, Streptococcus macacae
  REGION 1..1359: note = MISC_FEATURE - SpyMacCas9 polypeptide sequence
MDKKYSIGLDIGTNSVGWAVITDDYKVPSKKFKVLGNTDRHSIKKNLIGALLFGSGETAEATRLKRTARRRYTRRKNRICYLQEIFSNEMAKVDDSFFHRLEESFLVEEDKKHERHPIFGNIVDEVAYHEKYPTIYHLRKKLADSTDKADLRLIYLALAHMIKFRGHFLIEGDLNPDNSDVDKLFIQLVQIYNQLFEENPINASRVDAKAILSARLSKSRRLENLIAQLPGEKRNGLFGNLIALSLGLTPNFKSNFDLAEDAKLQLSKDTYDDDLDNLLAQIGDQYADLFLAAKNLSDAILLSDILRVNSEITKAPLSASMIKRYDEHHQDLTLLKALVRQQLPEKYKEIFFDQSKNGYAGYIDGGASQEEFYKFIKPILEKMDGTEELLVKLNREDLLRKQRTFDNGSIPHQIHLGELHAILRRQEDFYPFLKDNREKIEKILTFRIPYYVGPLARGNSRFAWMTRKSEETITPWNFEEVVDKGASAQSFIERMTNFDKNLPNEKVLPKHSLLYEYFTVYNELTKVKYVTEGMRKPAFLSGEQKKAIVDLLFKTNRKVTVKQLKEDYFKKIECFDSVEISGVEDRFNASLGAYHDLLKIIKDKDFLDNEENEDILEDIVLTLTLFEDRGMIEERLKTYAHLFDDKVMKQLKRRRYTGWGRLSRKLINGIRDKQSGKTILDFLKSDGFANRNFMQLIHDDSLTFKEDIQKAQVSGQGHSLHEQIANLAGSPAIKKGILQTVKIVDELVKVMGHKPENIVIEMARENQTTQKGQKNSRERMKRIEEGIKELGSQILKEHPVENTQLQNEKLYLYYLQNGRDMYVDQELDINRLSDYDVDHIVPQSFIKDDSIDNKVLTRSDKNRGKSDNVPSEEVVKKMKNYWRQLLNAKLITQRKFDNLTKAERGGLSELDKAGFIKRQLVETRQITKHVAQILDSRMNTKYDENDKLIREVKVITLKSKLVSDFRKDFQFYKVREINNYHHAHDAYLNAVVGTALIKKYPKLESEFVYGDYKVYDVRKMIAKSEQEIGKATAKYFFYSNIMNFFKTEITLANGEIRKRPLIETNGETGEIVWDKGRDFATVRKVLSMPQVNIVKKTEIQTVGQNGGLFDDNPKSPLEVTPSKLVPLKKELNPKKYGGYQKPTTAYPVLLITDTKQLIPISVMNKKQFEQNPVKFLRDRGYQQVGKNDFIKLPKYTLVDIGDGIKRLWASSKEIHKGNQLVVSKKSQILLYHAHHLDSDLSNDYLQNHNQQFDVLFNEIISFSKKCKLGKEHIQKIENVYSNKKNSASIEELAESFIKLLGFTQLGATSPFNFLGVKLNQKQYKGKKDYILPCTEGTLIRQSITGLYETRVDLSKIGED

SEQ ID NO: 238 - protein, 1410 aa, synthetic construct
  REGION 1..1410: note = CP5 polypeptide sequence
  REGION 1..341: note = MISC_FEATURE - Sequence derived from Cas9
  REGION 342..362: note = MISC_FEATURE - Linker sequence
  REGION 363..1388: note = MISC_FEATURE - Sequence derived from Cas9
  REGION 1389..1410: note = MISC_FEATURE - Bipartite nuclear localization sequence
EIGKATAKYFFYSNIMNFFKTEITLANGEIRKRPLIETNGETGEIVWDKGRDFATVRKVLSMPQVNIVKKTEVQTGGFSKESILPKRNSDKLIARKKDWDPKKYGGFMQPTVAYSVLVVAKVEKGKSKKLKSVKELLGITIMERSSFEKNPIDFLEAKGYKEVKKDLIIKLPKYSLFELENGRKRMLASAKFLQKGNELALPSKYVNFLYLASHYEKLKGSPEDNEQKQLFVEQHKHYLDEIIEQISEFSKRVILADANLDKVLSAYNKHRDKPIREQAENIIHLFTLTNLGAPRAFKYFDTTIARKEYRSTKEVLDATLIHQSITGLYETRIDLSQLGGDGGSGGSGGSGGSGGSGGSGGMDKKYSIGLAIGTNSVGWAVITDEYKVPSKKFKVLGNTDRHSIKKNLIGALLFDSGETAEATRLKRTARRRYTRRKNRICYLQEIFSNEMAKVDDSFFHRLEESFLVEEDKKHERHPIFGNIVDEVAYHEKYPTIYHLRKKLVDSTDKADLRLIYLALAHMIKFRGHFLIEGDLNPDNSDVDKLFIQLVQTYNQLFEENPINASGVDAKAILSARLSKSRRLENLIAQLPGEKKNGLFGNLIALSLGLTPNFKSNFDLAEDAKLQLSKDTYDDDLDNLLAQIGDQYADLFLAAKNLSDAILLSDILRVNTEITKAPLSASMIKRYDEHHQDLTLLKALVRQQLPEKYKEIFFDQSKNGYAGYIDGGASQEEFYKFIKPILEKMDGTEELLVKLNREDLLRKQRTFDNGSIPHQIHLGELHAILRRQEDFYPFLKDNREKIEKILTFRIPYYVGPLARGNSRFAWMTRKSEETITPWNFEEVVDKGASAQSFIERMTNFDKNLPNEKVLPKHSLLYEYFTVYNELTKVKYVTEGMRKPAFLSGEQKKAIVDLLFKTNRKVTVKQLKEDYFKKIECFDSVEISGVEDRFNASLGTYHDLLKIIKDKDFLDNEENEDILEDIVLTLTLFEDREMIEERLKTYAHLFDDKVMKQLKRRRYTGWGRLSRKLINGIRDKQSGKTILDFLKSDGFANRNFMQLIHDDSLTFKEDIQKAQVSGQGDSLHEHIANLAGSPAIKKGILQTVKVVDELVKVMGRHKPENIVIEMARENQTTQKGQKNSRERMKRIEEGIKELGSQILKEHPVENTQLQNEKLYLYYLQNGRDMYVDQELDINRLSDYDVDHIVPQSFLKDDSIDNKVLTRSDKNRGKSDNVPSEEVVKKMKNYWRQLLNAKLITQRKFDNLTKAERGGLSELDKAGFIKRQLVETRQITKHVAQILDSRMNTKYDENDKLIREVKVITLKSKLVSDFRKDFQFYKVREINNYHHAHDAYLNAVVGTALIKKYPKLESEFVYGDYKVYDVRKMIAKSEQEGADKRTADGSEFESPKKKRKV

SEQ ID NO: 239 - protein, 1302 aa, synthetic construct
  REGION 1..1302: note = Cas12c1 polypeptide sequence
MQTKKTHLHLISAKASRKYRRTIACLSDTAKKDLERRKQSGAADPAQELSCLKTIKFKLEVPEGSKLPSFDRISQIYNALETIEKGSLSYLLFALILSGFRIFPNSSAAKTFASSSCYKNDQFASQIKEIFGEMVKNFIPSELESILKKGRRKNNKDWTEENIKRVLNSEFGRKNSEGSSALFDSFLSKFSQELFRKFDSWNEVNKKYLEAAELLDSMLASYGPFDSVCKMIGDSDSRNSLPDKSTIAFTNNAEITVDIESSVMPYMAIAALLREYRQSKSKAAPVAYVQSHLTTTNGNGLSWFFKFGLDLIRKAPVSSKQSTSDGSKSLQELFSVPDDKLDGLKFIKEACEALPEASLLCGEKGELLGYQDFRTSFAGHIDSWVANYVNRLFELIELVNQLPESIKLPSILTQKNHNLVASLGLQEAEVSHSLELFEGLVKNVRQTLKKLAGIDISSSPNEQDIKEFYAFSDVLNRLGSIRNQIENAVQTAKKDKIDLESAIEWKEWKKLKKLPKLNGLGGGVPKQQELLDKALESVKQIRHYQRIDFERVIQWAVNEHCLETVPKFLVDAEKKKINKESSTDFAAKENAVRFLLEGIGAAARGKTDSVSKAAYNWFVVNNFLAKKDLNRYFINCQGCIYKPPYSKRRSLAFALRSDNKDTIEVVWEKFETFYKEISKEIEKFNIFSQEFQTFLHLENLRMKLLLRRIQKPIPAEIAFFSLPQEYYDSLPPNVAFLALNQEITPSEYITQFNLYSSFLNGNLILLRRSRSYLRAKFSWVGNSKLIYAAKEARLWKIPNAYWKSDEWKMILDSNVLVFDKAGNVLPAPTLKKVCEREGDLRLFYPLLRQLPHDWCYRNPFVKSVGREKNVIEVNKEGEPKVASALPGSLFRLIGPAPFKSLLDDCFFNPLDKDLRECMLIVDQEISQKVEAQKVEASLESCTYSIAVPIRYHLEEPKVSNQFENVLAIDQGEAGLAYAVFSLKSIGEAETKPIAVGTIRIPSIRRLIHSVSTYRKKKQRLQNFKQNYDSTAFIMRENVTGDVCAKIVGLMKEFNAFPVLEYDVKNLESGSRQLSAVYKAVNSHFLYFKEPGRDALRKQLWYGGDSWTIDGIEIVTRERKEDGKEGVEKIVPLKVFPGRSVSARFTSKTCSCCGRNVFDWLFTEKKAKTNKKFNVNSKGELTTADGVIQLFEADRSKGPKFYARRKERTPLTKPIAKGSYSLEEIERRVRTNLRRAPKSKQSRDTSQSQYFCVYKDCALHFSGMQADENAAINIGRRFLTALRKNRRSDFPSNVKISDRLLDN

SEQ ID NO: 240 - protein, 1218 aa, synthetic construct
  REGION 1..1218: note = Cas12c2 polypeptide sequence
MTKHSIPLHAFRNSGADARKWKGRIALLAKRGKETMRTLQFPLEMSEPEAAAINTTPFAVAYNAIEGTGKGTLFDYWAKLHLAGFRFFPSGGAATIFRQQAVFEDASWNAAFCQQSGKDWPWLVPSKLYERFTKAPREVAKKDGSKKSIEFTQENVANESHVSLVGASITDKTPEDQKEFFLKMAGALAEKFDSWKSANEDRIVAMKVIDEFLKSEGLHLPSLENIAVKCSVETKPDNATVAWHDAPMSGVQNLAIGVFATCASRIDNIYDLNGGKLSKLIQESATTPNVTALSWLFGKGLEYFRTTDIDTIMQDFNIPASAKESIKPLVESAQAIPTMTVLGKKNYAPFRPNFGGKIDSWIANYASRLMLLNDILEQIEPGFELPQALLDNETLMSGIDMTGDELKELIEAVYAWVDAAKQGLATLLGRGGNVDDAVQTFEQFSAMMDTLNGTLNTISARYVRAVEMAGKDEARLEKLIECKFDIPKWCKSVPKLVGISGGLPKVEEEIKVMNAAFKDVRARMFVRFEEIAAYVASKGAGMDVYDALEKRELEQIKKLKSAVPERAHIQAYRAVLHRIGRAVQNCSEKTKQLFSSKVIEMGVFKNPSHLNNFIFNQKGAIYRSPFDRSRHAPYQLHADKLLKNDWLELLAEISATLMASESTEQMEDALRLERTRLQLQLSGLPDWEYPASLAKPDIEVEIQTALKMQLAKDTVTSDVLQRAFNLYSSVLSGLTFKLLRRSFSLKMRFSVADTTQLIYVPKVCDWAIPKQYLQAEGEIGIAARVVTESSPAKMVTEVEMKEPKALGHFMQQAPHDWYFDASLGGTQVAGRIVEKGKEVGKERKLVGYRMRGNSAYKTVLDKSLVGNTELSQCSMIIEIPYTQTVDADFRAQVQAGLPKVSINLPVKETITASNKDEQMLFDRFVAIDLGERGLGYAVFDAKTLELQESGHRPIKAITNLLNRTHHYEQRPNQRQKFQAKFNVNLSELRENTVGDVCHQINRICAYYNAFPVLEYMVPDRLDKQLKSVYESVTNRYIWSSTDAHKSARVQFWLGGETWEHPYLKSAKDKKPLVLSPGRGASGKGTSQTCSCCGRNPFDLIKDMKPRAKIAVVDGKAKLENSELKLFERNLESKDDMLARRHRNERAGMEQPLTPGNYTVDEIKALLRANLRRAPKNRRTKDTTVSEYHCVFSDCGKTMHADENAAVNIGGKFIADIEK

SEQ ID NO: 241 - protein, 1252 aa, Oleiphilus sp.
  REGION 1..1252: note = MISC_FEATURE - OspCas12c polypeptide sequence
MTKLRHRQKKLTHDWAGSKKREVLGSNGKLQNPLLMPVKKGQVTEFRKAFSAYARATKGEMTDGRKNMFTHSFEPFKTKPSLHQCELADKAYQSLHSYLPGSLAHFLLSAHALGFRIFSKSGEATAFQASSKIEAYESKLASELACVDLSIQNLTISTLFNALTTSVRGKGEETSADPLIARFYTLLTGKPLSRDTQGPERDLAEVISRKIASSFGTWKEMTANPLQSLQFFEEELHALDANVSLSPAFDVLIKMNDLQGDLKNRTIVFDPDAPVFEYNAEDPADIIIKLTARYAKEAVIKNQNVGNYVKNAITTTNANGLGWLLNKGLSLLPVSTDDELLEFIGVERSHPSCHALIELIAQLEAPELFEKNVFSDTRSEVQGMIDSAVSNHIARLSSSRNSLSMDSEELERLIKSFQIHTPHCSLFIGAQSLSQQLESLPEALQSGVNSADILLGSTQYMLTNSLVEESIATYQRTLNRINYLSGVAGQINGAIKRKAIDGEKIHLPAAWSELISLPFIGQPVIDVESDLAHLKNQYQTLSNEFDTLISALQKNFDLNFNKALLNRTQHFEAMCRSTKKNALSKPEIVSYRDLLARLTSCLYRGSLVLRRAGIEVLKKHKIFESNSELREHVHERKHFVFVSPLDRKAKKLLRLTDSRPDLLHVIDEILQHDNLENKDRESLWLVRSGYLLAGLPDQLSSSFINLPIITQKGDRRLIDLIQYDQINRDAFVMLVTSAFKSNLSGLQYRANKQSFVVTRTLSPYLGSKLVYVPKDKDWLVPSQMFEGRFADILQSDYMVWKDAGRLCVIDTAKHLSNIKKSVFSSEEVLAFLRELPHRTFIQTEVRGLGVNVDGIAFNNGDIPSLKTFSNCVQVKVSRTNTSLVQTLNRWFEGGKVSPPSIQFERAYYKKDDQIHEDAAKRKIRFQMPATELVHASDDAGWTPSYLLGIDPGEYGMGLSLVSINNGEVLDSGFIHINSLINFASKKSNHQTKVVPRQQYKSPYANYLEQSKDSAAGDIAHILDRLIYKLNALPVFEALSGNSQSAADQVWTKVLSFYTWGDNDAQNSIRKQHWFGASHWDIKGMLRQPPTEKKPKPYIAFPGSQVSSYGNSQRCSCCGRNPIEQLREMAKDTSIKELKIRNSEIQLFDGTIKLFNPDPSTVIERRRHNLGPSRIPVADRTFKNISPSSLEFKELITIVSRSIRHSPEFIAKKRGIGSEYFCAYSDCNSSLNSEANAAANVAQKFQKQLFFEL

SEQ ID NO: 242 - protein, 767 aa, synthetic construct
  REGION 1..767: note = Cas12g1 polypeptide sequence
MAQASSTPAVSPRPRPRYREERTLVRKLLPRPGQSKQEFRENVKKLRKAFLQFNADVSGVCQWAIQFRPRYGKPAEPTETFWKFFLEPETSLPPNDSRSPEFRRLQAFEAAAGINGAAALDDPAFTNELRDSILAVASRPKTKEAQRLFSRLKDYQPAHRMILAKVAAEWIESRYRRAHQNWERNYEEWKKEKQEWEQNHPELTPEIREAFNQIFQQLEVKEKRVRICPAARLLQNKDNCQYAGKNKHSVLCNQFNEFKKNHLQGKAIKFFYKDAEKYLRCGLQSLKPNVQGPFREDWNKYLRYMNLKEETLRGKNGGRLPHCKNLGQECEFNPHTALCKQYQQQLSSRPDLVQHDELYRKWRREYWREPRKPVFRYPSVKRHSIAKIFGENYFQADFKNSVVGLRLDSMPAGQYLEFAFAPWPRNYRPQPGETEISSVHLHFVGTRPRIGFRFRVPHKRSRFDCTQEELDELRSRTFPRKAQDQKFLEAARKRLLETFPGNAEQELRLLAVDLGTDSARAAFFIGKTFQQAFPLKIVKIEKLYEQWPNQKQAGDRRDASSKQPRPGLSRDHVGRHLQKMRAQASEIAQKRQELTGTPAPETTTDQAAKKATLQPFDLRGLTVHTARMIRDWARLNARQIIQLAEENQVDLIVLESLRGFRPPGYENLDQEKKRRVAFFAHGRIRRKVTEKAVERGMRVVTVPYLASSKVCAECRKKQKDNKQWEKNKKRGLFKCEGCGSQAQVDENAARVLGRVFWGEIELPTAIP

SEQ ID NO: 243 - protein, 870 aa, synthetic construct
  REGION 1..870: note = Cas12h1 polypeptide sequence
MKVHEIPRSQLLKIKQYEGSFVEWYRDLQEDRKKFASLLFRWAAFGYAAREDDGATYISPSQALLERRLLLGDAEDVAIKFLDVLFKGGAPSSSCYSLFYEDFALRDKAKYSGAKREFIEGLATMPLDKIIERIRQDEQLSKIPAEEWLILGAEYSPEEIWEQVAPRIVNVDRSLGKQLRERLGIKCRRPHDAGYCKILMEVVARQLRSHNETYHEYLNQTHEMKTKVANNLTNEFDLVCEFAEVLEEKNYGLGWYVLWQGVKQALKEQKKPTKIQIAVDQLRQPKFAGLLTAKWRALKGAYDTWKLKKRLEKRKAFPYMPNWDNDYQIPVGLTGLGVFTLEVKRTEVVVDLKEHGKLFCSHSHYFGDLTAEKHPSRYHLKFRHKLKLRKRDSRVEPTIGPWIEAALREITIQKKPNGVFYLGLPYALSHGIDNFQIAKRFFSAAKPDKEVINGLPSEMVVGAADLNLSNIVAPVKARIGKGLEGPLHALDYGYGELIDGPKILTPDGPRCGELISLKRDIVEIKSAIKEFKACQREGLTMSEETTTWLSEVESPSDSPRCMIQSRIADTSRRLNSFKYQMNKEGYQDLAEALRLLDAMDSYNSLLESYQRMHLSPGEQSPKEAKFDTKRASFRDLLRRRVAHTIVEYFDDCDIVFFEDLDGPSDSDSRNNALVKLLSPRTLLLYIRQALEKRGIGMVEVAKDGTSQNNPISGHVGWRNKQNKSEIYFYEDKELLVMDADEVGAMNILCRGLNHSVCPYSFVTKAPEKKNDEKKEGDYGKRVKRFLKDRYGSSNVRFLVASMGFVTVTTKRPKDALVGKRLYYHGGELVTHDLHNRMKDEIKYLVEKEVLARRVSLSDSTIKSYKSFAHV

SEQ ID NO: 244 - protein, 1093 aa, synthetic construct
  REGION 1..1093: note = Cas12i1 polypeptide sequence
MSNKEKNASETRKAYTTKMIPRSHDRMKLLGNFMDYLMDGTPIFFELWNQFGGGIDRDIISGTANKDKISDDLLLAVNWFKVMPINSKPQGVSPSNLANLFQQYSGSEPDIQAQEYFASNFDTEKHQWKDMRVEYERLLAELQLSRSDMHHDLKLMYKEKCIGLSLSTAHYITSVMFGTGAKNNRQTKHQFYSKVIQLLEESTQINSVEQLASIILKAGDCDSYRKLRIRCSRKGATPSILKIVQDYELGTNHDDEVNVPSLIANLKEKLGRFEYECEWKCMEKIKAFLASKVGPYYLGSYSAMLENALSPIKGMTTKNCKFVLKQIDAKNDIKYENEPFGKIVEGFFDSPYFESDTNVKWVLHPHHIGESNIKTLWEDLNAIHSKYEEDIASLSEDKKEKRIKVYQGDVCQTINTYCEEVGKEAKTPLVQLLRYLYSRKDDIAVDKIIDGITFLSKKHKVEKQKINPVIQKYPSFNFGNNSKLLGKIISPKDKLKHNLKCNRNQVDNYIWIEIKVLNTKTMRWEKHHYALSSTRFLEEVYYPATSENPPDALAARFRTKTNGYEGKPALSAEQIEQIRSAPVGLRKVKKRQMRLEAARQQNLLPRYTWGKDFNINICKRGNNFEVTLATKVKKKKEKNYKVVLGYDANIVRKNTYAAIEAHANGDGVIDYNDLPVKPIESGFVTVESQVRDKSYDQLSYNGVKLLYCKPHVESRRSFLEKYRNGTMKDNRGNNIQIDFMKDFEAIADDETSLYYFNMKYCKLLQSSIRNHSSQAKEYREEIFELLRDGKLSVLKLSSLSNLSFVMFKVAKSLIGTYFGHLLKKPKNSKSDVKAPPITDEDKQKADPEMFALRLALEEKRLNKVKSKKEVIANKIVAKALELRDKYGPVLIKGENISDTTKKGKKSSTNSFLMDWLARGVANKVKEMVMMHQGLEFVEVNPNFTSHQDPFVHKNPENTFRARYSRCTPSELTEKNRKEILSFLSDKPSKRPTNAYYNEGAMAFLATYGLKKNDVLGVSLEKFKQIMANILHQRSEDQLLFPSRGGMFYLATYKLDADATSVNWNGKQFWVCNADLVAAYNVGLVDIQKDFKKK

SEQ ID NO: 245 - protein, 1054 aa, synthetic construct
  REGION 1..1054: note = Cas12i2 polypeptide sequence
MSSAIKSYKSVLRPNERKNQLLKSTIQCLEDGSAFFFKMLQGLFGGITPEIVRFSTEQEKQQQDIALWCAVNWFRPVSQDSLTHTIASDNLVEKFEEYYGGTASDAIKQYFSASIGESYYWNDCRQQYYDLCRELGVEVSDLTHDLEILCREKCLAVATESNQNNSIISVLFGTGEKEDRSVKLRITKKILEAISNLKEIPKNVAPIQEIILNVAKATKETFRQVYAGNLGAPSTLEKFIAKDGQKEFDLKKLQTDLKKVIRGKSKERDWCCQEELRSYVEQNTIQYDLWAWGEMFNKAHTALKIKSTRNYNFAKQRLEQFKEIQSLNNLLVVKKLNDFFDSEFFSGEETYTICVHHLGGKDLSKLYKAWEDDPADPENAIVVLCDDLKNNFKKEPIRNILRYIFTIRQECSAQDILAAAKYNQQLDRYKSQKANPSVLGNQGFTWTNAVILPEKAQRNDRPNSLDLRIWLYLKLRHPDGRWKKHHIPFYDTRFFQEIYAAGNSPVDTCQFRTPRFGYHLPKLTDQTAIRVNKKHVKAAKTEARIRLAIQQGTLPVSNLKITEISATINSKGQVRIPVKFDVGRQKGTLQIGDRFCGYDQNQTASHAYSLWEVVKEGQYHKELGCFVRFISSGDIVSITENRGNQFDQLSYEGLAYPQYADWRKKASKFVSLWQITKKNKKKEIVTVEAKEKFDAICKYQPRLYKFNKEYAYLLRDIVRGKSLVELQQIRQEIFRFIEQDCGVTRLGSLSLSTLETVKAVKGIIYSYFSTALNASKNNPISDEQRKEFDPELFALLEKLELIRTRKKKQKVERIANSLIQTCLENNIKFIRGEGDLSTTNNATKKKANSRSMDWLARGVFNKIRQLAPMHNITLFGCGSLYTSHQDPLVHRNPDKAMKCRWAAIPVKDIGDWVLRKLSQNLRAKNIGTGEYYHQGVKEFLSHYELQDLEEELLKWRSDRKSNIPCWVLQNRLAEKLGNKEAVVYIPVRGGRIYFATHKVATGAVSIVFDQKQVWVCNADHVAAANIALTVKGIGEQSSDEENPDGSRIKLQLTS

SEQ ID NO: 246 - protein, 4 aa, synthetic construct
  REGION 1..4: note = synthetic peptide sequence
GGGS

SEQ ID NO: 247 - protein, 5 aa, synthetic construct
  REGION 1..5: note = synthetic peptide sequence
GGGGS

SEQ ID NO: 248 - protein, 5 aa, synthetic construct
  REGION 1..5: note = synthetic peptide sequence
EAAAK

SEQ ID NO: 249 - protein, 16 aa, synthetic construct
  REGION 1..16: note = synthetic peptide sequence
SGSETPGTSESATPES

SEQ ID NO: 250 - protein, 6 aa, synthetic construct
  REGION 1..6: note = linker peptide sequence
GGSGGS

SEQ ID NO: 251 - protein, 20 aa, synthetic construct
  REGION 1..20: note = synthetic peptide sequence
GSSGSETPGTSESATPESSG

SEQ ID NO: 252 - DNA, 18 bp, synthetic construct
  misc_feature 1..18: note = synthetic oligonucleotide sequence
  source 1..18: mol_type = other DNA
ggaggctctggaggaagc

SEQ ID NO: 253 - DNA, 60 bp, synthetic construct
  misc_feature 1..60: note = synthetic oligonucleotide sequence
  source 1..60: mol_type = other DNA
ggctcttctggatctgaaacacctggcacaagcgagagcgccacccctgagagctctggc

SEQ ID NO: 254 - protein, 1129 aa, Alicyclobacillus acidiphilus
  REGION 1..1129: note = MISC_FEATURE - AacCas12b polypeptide sequence
MAVKSMKVKLRLDNMPEIRAGLWKLHTEVNAGVRYYTEWLSLLRQENLYRRSPNGDGEQECYKTAEECKAELLERLRARQVENGHCGPAGSDDELLQLARQLYELLVPQAIGAKGDAQQIARKFLSPLADKDAVGGLGIAKAGNKPRWVRMREAGEPGWEEEKAKAEARKSTDRTADVLRALADFGLKPLMRVYTDSDMSSVQWKPLRKGQAVRTWDRDMFQQAIERMMSWESWNQRVGEAYAKLVEQKSRFEQKNFVGQEHLVQLVNQLQQDMKEASHGLESKEQTAHYLTGRALRGSDKVFEKWEKLDPDAPFDLYDTEIKNVQRRNTRRFGSHDLFAKLAEPKYQALWREDASFLTRYAVYNSIVRKLNHAKMFATFTLPDATAHPIWTRFDKLGGNLHQYTFLFNEFGEGRHAIRFQKLLTVEDGVAKEVDDVTVPISMSAQLDDLLPRDPHELVALYFQDYGAEQHLAGEFGGAKIQYRRDQLNHLHARRGARDVYLNLSVRVQSQSEARGERRPPYAAVFRLVGDNHRAFVHFDKLSDYLAEHPDDGKLGSEGLLSGLRVMSVDLGLRTSASISVFRVARKDELKPNSEGRVPFCFPIEGNENLVAVHERSQLLKLPGETESKDLRAIREERQRTLRQLRTQLAYLRLLVRCGSEDVGRRERSWAKLIEQPMDANQMTPDWREAFEDELQKLKSLYGICGDREWTEAVYESVRRVWRHMGKQVRDWRKDVRSGERPKIRGYQKDVVGGNSIEQIEYLERQYKFLKSWSFFGKVSGQVIRAEKGSRFAITLREHIDHAKEDRLKKLADRIIMEALGYVYALDDERGKGKWVAKYPPCQLILLEELSEYQFNNDRPPSENNQLMQWSHRGVFQELLNQAQVHDLLVGTMYAAFSSRFDARTGAPGIRCRRVPARCAREQNPEPFPWWLNKFVAEHKLDGCPLRADDLIPTGEGEFFVSPFSAEEGDFHQIHADLNAAQNLQRRLWSDFDISQIRLRCDWGEVDGEPVLIPRTTGKRTADSYGNKVFYTKTGVTYYERERGKKRRKVFAQEELSEEEAELLVEADEAREKSVVLMRDPSGIINRGDWTRQKEFWSMVNQRIEGYLVKQIRSRVRLQESACENTGDI

SEQ ID NO: 255 - protein, 1140 aa, Bacillus hisashii
  REGION 1..1140: note = MISC_FEATURE - BhCas12b polypeptide sequence
MAPKKKRKVGIHGVPAAATRSFILKIEPNEEVKKGLWKTHEVLNHGIAYYMNILKLIRQEAIYEHHEQDPKNPKKVSKAEIQAELWDFVLKMQKCNSFTHEVDKDEVFNILRELYEELVPSSVEKKGEANQLSNKFLYPLVDPNSQSGKGTASSGRKPRWYNLKIAGDPSWEEEKKKWEEDKKKDPLAKILGKLAEYGLIPLFIPYTDSNEPIVKEIKWMEKSRNQSVRRLDKDMFIQALERFLSWESWNLKVKEEYEKVEKEYKTLEERIKEDIQALKALEQYEKERQEQLLRDTLNTNEYRLSKRGLRGWREIIQKWLKMDENEPSEKYLEVFKDYQRKHPREAGDYSVYEFLSKKENHFIWRNHPEYPYLYATFCEIDKKKKDAKQQATFTLADPINHPLWVRFEERSGSNLNKYRILTEQLHTEKLKKKLTVQLDRLIYPTESGGWEEKGKVDIVLLPSRQFYNQIFLDIEEKGKHAFTYKDESIKFPLKGTLGGARVQFDRDHLRRYPHKVESGNVGRIYFNMTVNIEPTESPVSKSLKIHRDDFPKVVNFKPKELTEWIKDSKGKKLKSGIESLEIGLRVMSIDLGQRQAAAASIFEVVDQKPDIEGKLFFPIKGTELYAVHRASFNIKLPGETLVKSREVLRKAREDNLKLMNQKLNFLRNVLHFQQFEDITEREKRVTKWISRQENSDVPLVYQDELIQIRELMYKPYKDWVAFLKQLHKRLEVEIGKEVKHWRKSLSDGRKGLYGISLKNIDEIDRTRKFLLRWSLRPTEPGEVRRLEPGQRFAIDQLNHLNALKEDRLKKMANTIIMHALGYCYDVRKKKWQAKNPACQIILFEDLSNYNPYEERSRFENSKLMKWSRREIPRQVALQGEIYGLQVGEVGAQFSSRFHAKTGSPGIRCSVVTKEKLQDNRFFKNLQREGRLTLDKIAVLKEGDLYPDKGGEKFISLSKDRKCVTTHADINAAQNLQKRFWTRTHGFYKVYCKAYQVDGQTVYIPESKDQKQKIIEEFGEGYFILKDGVYEWVNAGKLKIKKGSSKQSSSELVDSDILKDSFDLASELKGEKLMLYRDPSGNVFPSDKWMAAGVFFGKLERILISKLTNQYSISTIEDDSSKQSMKRPAATKKAGQAKKKK

SEQ ID NO: 256 - protein, 1108 aa, Bacillus thermoamylovorans
  REGION 1..1108: note = MISC_FEATURE - BTCas12b polypeptide sequence
MATRSFILKIEPNEEVKKGLWKTHEVLNHGIAYYMNILKLIRQEAIYEHHEQDPKNPKKVSKAEIQAELWDFVLKMQKCNSFTHEVDKDVVFNILRELYEELVPSSVEKKGEANQLSNKFLYPLVDPNSQSGKGTASSGRKPRWYNLKIAGDPSWEEEKKKWEEDKKKDPLAKILGKLAEYGLIPLFIPFTDSNEPIVKEIKWMEKSRNQSVRRLDKDMFIQALERFLSWESWNLKVKEEYEKVEKEHKTLEERIKEDIQAFKSLEQYEKERQEQLLRDTLNTNEYRLSKRGLRGWREIIQKWLKMDENEPSEKYLEVFKDYQRKHPREAGDYSVYEFLSKKENHFIWRNHPEYPYLYATFCEIDKKKKDAKQQATFTLADPINHPLWVRFEERSGSNLNKYRILTEQLHTEKLKKKLTVQLDRLIYPTESGGWEEKGKVDIVLLPSRQFYNQIFLDIEEKGKHAFTYKDESIKFPLKGTLGGARVQFDRDHLRRYPHKVESGNVGRIYFNMTVNIEPTESPVSKSLKIHRDDFPKFVNFKPKELTEWIKDSKGKKLKSGIESLEIGLRVMSIDLGQRQAAAASIFEVVDQKPDIEGKLFFPIKGTELYAVHRASFNIKLPGETLVKSREVLRKAREDNLKLMNQKLNFLRNVLHFQQFEDITEREKRVTKWISRQENSDVPLVYQDELIQIRELMYKPYKDWVAFLKQLHKRLEVEIGKEVKHWRKSLSDGRKGLYGISLKNIDEIDRTRKFLLRWSLRPTEPGEVRRLEPGQRFAIDQLNHLNALKEDRLKKMANTIIMHALGYCYDVRKKKWQAKNPACQIILFEDLSNYNPYEERSRFENSKLMKWSRREIPRQVALQGEIYGLQVGEVGAQFSSRFHAKTGSPGIRCSVVTKEKLQDNRFFKNLQREGRLTLDKIAVLKEGDLYPDKGGEKFISLSKDRKLVTTHADINAAQNLQKRFWTRTHGFYKVYCKAYQVDGQTVYIPESKDQKQKIIEEFGEGYFILKDGVYEWGNAGKLKIKKGSSKQSSSELVDSDILKDSFDLASELKGEKLMLYRDPSGNVFPSDKWMAAGVFFGKLERILISKLTNQYSISTIEDDSSKQSM

SEQ ID NO: 257 - protein, 1112 aa, Bacillus sp.
  REGION 1..1112: note = MISC_FEATURE - BvCas12b (Bacillus sp. V3-13) polypeptide sequence
MAIRSIKLKMKTNSGTDSIYLRKALWRTHQLINEGIAYYMNLLTLYRQEAIGDKTKEAYQAELINIIRNQQRNNGSSEEHGSDQEILALLRQLYELIIPSSIGESGDANQLGNKFLYPLVDPNSQSGKGTSNAGRKPRWKRLKEEGNPDWELEKKKDEERKAKDPTVKIFDNLNKYGLLPLFPLFTNIQKDIEWLPLGKRQSVRKWDKDMFIQAIERLLSWESWNRRVADEYKQLKEKTESYYKEHLTGGEEWIEKIRKFEKERNMELEKNAFAPNDGYFITSRQIRGWDRVYEKWSKLPESASPEELWKVVAEQQNKMSEGFGDPKVFSFLANRENRDIWRGHSERIYHIAAYNGLQKKLSRTKEQATFTLPDAIEHPLWIRYESPGGTNLNLFKLEEKQKKNYYVTLSKIIWPSEEKWIEKENIEIPLAPSIQFNRQIKLKQHVKGKQEISFSDYSSRISLDGVLGGSRIQFNRKYIKNHKELLGEGDIGPVFFNLVVDVAPLQETRNGRLQSPIGKALKVISSDFSKVIDYKPKELMDWMNTGSASNSFGVASLLEGMRVMSIDMGQRTSASVSIFEVVKELPKDQEQKLFYSINDTELFAIHKRSFLLNLPGEVVTKNNKQQRQERRKKRQFVRSQIRMLANVLRLETKKTPDERKKAIHKLMEIVQSYDSWTASQKEVWEKELNLLTNMAAFNDEIWKESLVELHHRIEPYVGQIVSKWRKGLSEGRKNLAGISMWNIDELEDTRRLLISWSKRSRTPGEANRIETDEPFGSSLLQHIQNVKDDRLKQMANLIIMTALGFKYDKEEKDRYKRWKETYPACQIILFENLNRYLFNLDRSRRENSRLMKWAHRSIPRTVSMQGEMFGLQVGDVRSEYSSRFHAKTGAPGIRCHALTEEDLKAGSNTLKRLIEDGFINESELAYLKKGDIIPSQGGELFVTLSKRYKKDSDNNELTVIHADINAAQNLQKRFWQQNSEVYRVPCQLARMGEDKLYIPKSQTETIKKYFGKGSFVKNNTEQEVYKWEKSEKMKIKTDTTFDLQDLDGFEDISKTIELAQEQQKKYLTMFRDPSGYFFNNETWRPQKEYWSIVNNIIKSCLKKKILSNKVEL

SEQ ID NO: 258 - DNA, 47 bp, synthetic construct
  misc_feature 1..47: note = 5'UTR oligonucleotide sequence
  source 1..47: mol_type = other DNA
gggaaataagagagaaaagaagagtaagaagaaatataagagccacc

SEQ ID NO: 259 - DNA, 101 bp, synthetic construct
  misc_feature 1..101: note = 3'UTR (TriLink standard UTR)polynucleotide sequence
  source 1..101: mol_type = other DNA
gctggagcctcggtggccatgcttcttgccccttgggcctccccccagcccctcctccccttcctgcacccgtacccccgtggtctttgaataaagtctga

SEQ ID NO: 260 - DNA, 3420 bp, Bacillus hisashii
  misc_feature 1..3420: note = bhCas12b (V4) polynucleotide sequence
  source 1..3420: mol_type = genomic DNA
atggccccaaagaagaagcggaaggtcggtatccacggagtcccagcagccgccaccagatccttcatcctgaagatcgagcccaacgaggaagtgaagaaaggcctctggaaaacccacgaggtgctgaaccacggaatcgcctactacatgaatatcctgaagctgatccggcaagaggccatctacgagcaccacgagcaggaccccaagaatcccaagaaggtgtccaaggccgagatccaggccgagctgtgggatttcgtgctgaagatgcagaagtgcaacagcttcacacacgaggtggacaaggacgaggtgttcaacatcctgagagagctgtacgaggaactggtgcccagcagcgtggaaaagaagggcgaagccaaccagctgagcaacaagtttctgtaccctctggtggaccccaacagccagtctggaaagggaacagccagcagcggcagaaagcccagatggtacaacctgaagattgccggcgatccctcctgggaagaagagaagaagaagtgggaagaagataagaaaaaggacccgctggccaagatcctgggcaagctggctgagtacggactgatccctctgttcatcccctacaccgacagcaacgagcccatcgtgaaagaaatcaagtggatggaaaagtcccggaaccagagcgtgcggcggctggataaggacatgttcattcaggccctggaacggttcctgagctgggagagctggaacctgaaagtgaaagaggaatacgagaaggtcgagaaagagtacaagaccctggaagagaggatcaaagaggacatccaggctctgaaggctctggaacagtatgagaaagagcggcaagaacagctgctgcgggacaccctgaacaccaacgagtaccggctgagcaagagaggccttagaggctggcgggaaatcatccagaaatggctgaaaatggacgagaacgagccctccgagaagtacctggaagtgttcaaggactaccagcggaagcaccctagagaggccggcgattacagcgtgtacgagttcctgtccaagaaagagaaccacttcatctggcggaatcaccctgagtacccctacctgtacgccaccttctgcgagatcgacaagaaaaagaaggacgccaagcagcaggccaccttcacactggccgatcctatcaatcaccctctgtgggtccgattcgaggaaagaagcggcagcaacctgaacaagtacagaatcctgaccgagcagctgcacaccgagaagctgaagaaaaagctgacagtgcagctggaccggctgatctaccctacagaatctggcggctgggaagagaagggcaaagtggacattgtgctgctgcccagccggcagttctacaaccagatcttcctggacatcgaggaaaagggcaagcacgccttcacctacaaggatgagagcatcaagttccctctgaagggcacactcggcggagccagagtgcagttcgacagagatcacctgagaagataccctcacaaggtggaaagcggcaacgtgggcagaatctacttcaacatgaccgtgaacatcgagcctacagagtccccagtgtccaagtctctgaagatccaccgggacgacttccccaaggtggtcaacttcaagcccaaagaactgaccgagtggatcaaggacagcaagggcaagaaactgaagtccggcatcgagtccctggaaatcggcctgagagtgatgagcatcgacctgggacagagacaggccgctgccgcctctattttcgaggtggtggatcagaagcccgacatcgaaggcaagctgtttttcccaatcaagggcaccgagctgtatgccgtgcacagagccagcttcaacatcaagctgcccggcgagacactggtcaagagcagagaagtgctgcggaaggccagagaggacaatctgaaactgatgaaccagaagctcaacttcctgcggaacgtgctgcacttccagcagttcgaggacatcaccgagagagagaagcgggtcaccaagtggatcagcagacaagagaacagcgacgtgcccctggtgtaccaggatgagctgatccagatccgcgagctgatgtacaagccttacaaggactgggtcgccttcctgaagcagctccacaagagactggaagtcgagatcggcaaagaagtgaagcactggcggaagtccctgagcgacggaagaaagggcctgtacggcatctccctgaagaacatcgacgagatcgatcggacccggaagttcctgctgagatggtccctgaggcctaccgaacctggcgaagtgcgtagactggaacccggccagagattcgccatcgaccagctgaatcacctgaacgccctgaaagaagatcggctgaagaagatggccaacaccatcatcatgcacgccctgggctactgctacgacgtgcggaagaagaaatggcaggctaagaaccccgcctgccagatcatcctgttcgaggatctgagcaactacaacccctacgaggaaaggtcccgcttcgagaacagcaagctcatgaagtggtccagacgcgagatccccagacaggttgcactgcagggcgagatctatggcctgcaagtgggagaagtgggcgctcagttcagcagcagattccacgccaagacaggcagccctggcatcagatgtagcgtcgtgaccaaagagaagctgcaggacaatcggttcttcaagaatctgcagagagagggcagactgaccctggacaaaatcgccgtgctgaaagagggcgatctgtacccagacaaaggcggcgagaagttcatcagcctgagcaaggatcggaagtgcgtgaccacacacgccgacatcaacgccgctcagaacctgcagaagcggttctggacaagaacccacggcttctacaaggtgtactgcaaggcctaccaggtggacggccagaccgtgtacatccctgagagcaaggaccagaagcagaagatcatcgaagagttcggcgagggctacttcattctgaaggacggggtgtacgaatgggtcaacgccggcaagctgaaaatcaagaagggcagctccaagcagagcagcagcgagctggtggatagcgacatcctgaaagacagcttcgacctggcctccgagctgaaaggcgaaaagctgatgctgtacagggaccccagcggcaatgtgttccccagcgacaaatggatggccgctggcgtgttcttcggaaagctggaacgcatcctgatcagcaagctgaccaaccagtactccatcagcaccatcgaggacgacagcagcaagcagtctatgaaaaggccggcggccacgaaaaaggccggccaggcaaaaaagaaaaag

SEQ ID NO: 261 - protein, 17 aa, synthetic construct
  REGION 1..17: note = synthetic peptide sequence
MAPKKKRKVGIHGVPAA

SEQ ID NO: 262 - DNA, 51 bp, synthetic construct
  misc_feature 1..51: note = synthetic oligonucleotide sequence
  source 1..51: mol_type = other DNA
atggccccaaagaagaagcggaaggtcggtatccacggagtcccagcagcc

SEQ ID NO: 263 - protein, 1554 aa, synthetic construct
  REGION 1..1554: note = 101 Cas9 TadAins 1015 polypeptide sequence
MDKKYSIGLAIGTNSVGWAVITDEYKVPSKKFKVLGNTDRHSIKKNLIGALLFDSGETAEATRLKRTARRRYTRRKNRICYLQEIFSNEMAKVDDSFFHRLEESFLVEEDKKHERHPIFGNIVDEVAYHEKYPTIYHLRKKLVDSTDKADLRLIYLALAHMIKFRGHFLIEGDLNPDNSDVDKLFIQLVQTYNQLFEENPINASGVDAKAILSARLSKSRRLENLIAQLPGEKKNGLFGNLIALSLGLTPNFKSNFDLAEDAKLQLSKDTYDDDLDNLLAQIGDQYADLFLAAKNLSDAILLSDILRVNTEITKAPLSASMIKRYDEHHQDLTLLKALVRQQLPEKYKEIFFDQSKNGYAGYIDGGASQEEFYKFIKPILEKMDGTEELLVKLNREDLLRKQRTFDNGSIPHQIHLGELHAILRRQEDFYPFLKDNREKIEKILTFRIPYYVGPLARGNSRFAWMTRKSEETITPWNFEEVVDKGASAQSFIERMTNFDKNLPNEKVLPKHSLLYEYFTVYNELTKVKYVTEGMRKPAFLSGEQKKAIVDLLFKTNRKVTVKQLKEDYFKKIECFDSVEISGVEDRFNASLGTYHDLLKIIKDKDFLDNEENEDILEDIVLTLTLFEDREMIEERLKTYAHLFDDKVMKQLKRRRYTGWGRLSRKLINGIRDKQSGKTILDFLKSDGFANRNFMQLIHDDSLTFKEDIQKAQVSGQGDSLHEHIANLAGSPAIKKGILQTVKVVDELVKVMGRHKPENIVIEMARENQTTQKGQKNSRERMKRIEEGIKELGSQILKEHPVENTQLQNEKLYLYYLQNGRDMYVDQELDINRLSDYDVDHIVPQSFLKDDSIDNKVLTRSDKNRGKSDNVPSEEVVKKMKNYWRQLLNAKLITQRKFDNLTKAERGGLSELDKAGFIKRQLVETRQITKHVAQILDSRMNTKYDENDKLIREVKVITLKSKLVSDFRKDFQFYKVREINNYHHAHDAYLNAVVGTALIKKYPKLESEFVYGDYKVGSSGSETPGTSESATPESSGSEVEFSHEYWMRHALTLAKRARDEREVPVGAVLVLNNRVIGEGWNRAIGLHDPTAHAEIMALRQGGLVMQNYRLIDATLYVTFEPCVMCAGAMIHSRIGRVVFGVRNAKTGAAGSLMDVLHYPGMNHRVEITEGILADECAALLCYFFRMPRQVFNAQKKAQSSTDYDVRKMIAKSEQEIGKATAKYFFYSNIMNFFKTEITLANGEIRKRPLIETNGETGEIVWDKGRDFATVRKVLSMPQVNIVKKTEVQTGGFSKESILPKRNSDKLIARKKDWDPKKYGGFDSPTVAYSVLVVAKVEKGKSKKLKSVKELLGITIMERSSFEKNPIDFLEAKGYKEVKKDLIIKLPKYSLFELENGRKRMLASAGELQKGNELALPSKYVNFLYLASHYEKLKGSPEDNEQKQLFVEQHKHYLDEIIEQISEFSKRVILADANLDKVLSAYNKHRDKPIREQAENIIHLFTLTNLGAPAAFKYFDTTIDRKRYTSTKEVLDATLIHQSITGLYETRIDLSQLGGD

SEQ ID NO: 264 - protein, 1554 aa, synthetic construct
  REGION 1..1554: note = 102 Cas9 TadAins 1022 polypeptide sequence
MDKKYSIGLAIGTNSVGWAVITDEYKVPSKKFKVLGNTDRHSIKKNLIGALLFDSGETAEATRLKRTARRRYTRRKNRICYLQEIFSNEMAKVDDSFFHRLEESFLVEEDKKHERHPIFGNIVDEVAYHEKYPTIYHLRKKLVDSTDKADLRLIYLALAHMIKFRGHFLIEGDLNPDNSDVDKLFIQLVQTYNQLFEENPINASGVDAKAILSARLSKSRRLENLIAQLPGEKKNGLFGNLIALSLGLTPNFKSNFDLAEDAKLQLSKDTYDDDLDNLLAQIGDQYADLFLAAKNLSDAILLSDILRVNTEITKAPLSASMIKRYDEHHQDLTLLKALVRQQLPEKYKEIFFDQSKNGYAGYIDGGASQEEFYKFIKPILEKMDGTEELLVKLNREDLLRKQRTFDNGSIPHQIHLGELHAILRRQEDFYPFLKDNREKIEKILTFRIPYYVGPLARGNSRFAWMTRKSEETITPWNFEEVVDKGASAQSFIERMTNFDKNLPNEKVLPKHSLLYEYFTVYNELTKVKYVTEGMRKPAFLSGEQKKAIVDLLFKTNRKVTVKQLKEDYFKKIECFDSVEISGVEDRFNASLGTYHDLLKIIKDKDFLDNEENEDILEDIVLTLTLFEDREMIEERLKTYAHLFDDKVMKQLKRRRYTGWGRLSRKLINGIRDKQSGKTILDFLKSDGFANRNFMQLIHDDSLTFKEDIQKAQVSGQGDSLHEHIANLAGSPAIKKGILQTVKVVDELVKVMGRHKPENIVIEMARENQTTQKGQKNSRERMKRIEEGIKELGSQILKEHPVENTQLQNEKLYLYYLQNGRDMYVDQELDINRLSDYDVDHIVPQSFLKDDSIDNKVLTRSDKNRGKSDNVPSEEVVKKMKNYWRQLLNAKLITQRKFDNLTKAERGGLSELDKAGFIKRQLVETRQITKHVAQILDSRMNTKYDENDKLIREVKVITLKSKLVSDFRKDFQFYKVREINNYHHAHDAYLNAVVGTALIKKYPKLESEFVYGDYKVYDVRKMIGSSGSETPGTSESATPESSGSEVEFSHEYWMRHALTLAKRARDEREVPVGAVLVLNNRVIGEGWNRAIGLHDPTAHAEIMALRQGGLVMQNYRLIDATLYVTFEPCVMCAGAMIHSRIGRVVFGVRNAKTGAAGSLMDVLHYPGMNHRVEITEGILADECAALLCYFFRMPRQVFNAQKKAQSSTDAKSEQEIGKATAKYFFYSNIMNFFKTEITLANGEIRKRPLIETNGETGEIVWDKGRDFATVRKVLSMPQVNIVKKTEVQTGGFSKESILPKRNSDKLIARKKDWDPKKYGGFDSPTVAYSVLVVAKVEKGKSKKLKSVKELLGITIMERSSFEKNPIDFLEAKGYKEVKKDLIIKLPKYSLFELENGRKRMLASAGELQKGNELALPSKYVNFLYLASHYEKLKGSPEDNEQKQLFVEQHKHYLDEIIEQISEFSKRVILADANLDKVLSAYNKHRDKPIREQAENIIHLFTLTNLGAPAAFKYFDTTIDRKRYTSTKEVLDATLIHQSITGLYETRIDLSQLGGD

SEQ ID NO: 265 - protein, 1554 aa, synthetic construct
  REGION 1..1554: note = 103 Cas9 TadAins 1029 polypeptide sequence
MDKKYSIGLAIGTNSVGWAVITDEYKVPSKKFKVLGNTDRHSIKKNLIGALLFDSGETAEATRLKRTARRRYTRRKNRICYLQEIFSNEMAKVDDSFFHRLEESFLVEEDKKHERHPIFGNIVDEVAYHEKYPTIYHLRKKLVDSTDKADLRLIYLALAHMIKFRGHFLIEGDLNPDNSDVDKLFIQLVQTYNQLFEENPINASGVDAKAILSARLSKSRRLENLIAQLPGEKKNGLFGNLIALSLGLTPNFKSNFDLAEDAKLQLSKDTYDDDLDNLLAQIGDQYADLFLAAKNLSDAILLSDILRVNTEITKAPLSASMIKRYDEHHQDLTLLKALVRQQLPEKYKEIFFDQSKNGYAGYIDGGASQEEFYKFIKPILEKMDGTEELLVKLNREDLLRKQRTFDNGSIPHQIHLGELHAILRRQEDFYPFLKDNREKIEKILTFRIPYYVGPLARGNSRFAWMTRKSEETITPWNFEEVVDKGASAQSFIERMTNFDKNLPNEKVLPKHSLLYEYFTVYNELTKVKYVTEGMRKPAFLSGEQKKAIVDLLFKTNRKVTVKQLKEDYFKKIECFDSVEISGVEDRFNASLGTYHDLLKIIKDKDFLDNEENEDILEDIVLTLTLFEDREMIEERLKTYAHLFDDKVMKQLKRRRYTGWGRLSRKLINGIRDKQSGKTILDFLKSDGFANRNFMQLIHDDSLTFKEDIQKAQVSGQGDSLHEHIANLAGSPAIKKGILQTVKVVDELVKVMGRHKPENIVIEMARENQTTQKGQKNSRERMKRIEEGIKELGSQILKEHPVENTQLQNEKLYLYYLQNGRDMYVDQELDINRLSDYDVDHIVPQSFLKDDSIDNKVLTRSDKNRGKSDNVPSEEVVKKMKNYWRQLLNAKLITQRKFDNLTKAERGGLSELDKAGFIKRQLVETRQITKHVAQILDSRMNTKYDENDKLIREVKVITLKSKLVSDFRKDFQFYKVREINNYHHAHDAYLNAVVGTALIKKYPKLESEFVYGDYKVYDVRKMIAKSEQEIGSSGSETPGTSESATPESSGSEVEFSHEYWMRHALTLAKRARDEREVPVGAVLVLNNRVIGEGWNRAIGLHDPTAHAEIMALRQGGLVMQNYRLIDATLYVTFEPCVMCAGAMIHSRIGRVVFGVRNAKTGAAGSLMDVLHYPGMNHRVEITEGILADECAALLCYFFRMPRQVFNAQKKAQSSTDGKATAKYFFYSNIMNFFKTEITLANGEIRKRPLIETNGETGEIVWDKGRDFATVRKVLSMPQVNIVKKTEVQTGGFSKESILPKRNSDKLIARKKDWDPKKYGGFDSPTVAYSVLVVAKVEKGKSKKLKSVKELLGITIMERSSFEKNPIDFLEAKGYKEVKKDLIIKLPKYSLFELENGRKRMLASAGELQKGNELALPSKYVNFLYLASHYEKLKGSPEDNEQKQLFVEQHKHYLDEIIEQISEFSKRVILADANLDKVLSAYNKHRDKPIREQAENIIHLFTLTNLGAPAAFKYFDTTIDRKRYTSTKEVLDATLIHQSITGLYETRIDLSQLGGD

SEQ ID NO: 266 - protein, 1554 aa, synthetic construct
  REGION 1..1554: note = 103 Cas9 TadAins 1040 polypeptide sequence
MDKKYSIGLAIGTNSVGWAVITDEYKVPSKKFKVLGNTDRHSIKKNLIGALLFDSGETAEATRLKRTARRRYTRRKNRICYLQEIFSNEMAKVDDSFFHRLEESFLVEEDKKHERHPIFGNIVDEVAYHEKYPTIYHLRKKLVDSTDKADLRLIYLALAHMIKFRGHFLIEGDLNPDNSDVDKLFIQLVQTYNQLFEENPINASGVDAKAILSARLSKSRRLENLIAQLPGEKKNGLFGNLIALSLGLTPNFKSNFDLAEDAKLQLSKDTYDDDLDNLLAQIGDQYADLFLAAKNLSDAILLSDILRVNTEITKAPLSASMIKRYDEHHQDLTLLKALVRQQLPEKYKEIFFDQSKNGYAGYIDGGASQEEFYKFIKPILEKMDGTEELLVKLNREDLLRKQRTFDNGSIPHQIHLGELHAILRRQEDFYPFLKDNREKIEKILTFRIPYYVGPLARGNSRFAWMTRKSEETITPWNFEEVVDKGASAQSFIERMTNFDKNLPNEKVLPKHSLLYEYFTVYNELTKVKYVTEGMRKPAFLSGEQKKAIVDLLFKTNRKVTVKQLKEDYFKKIECFDSVEISGVEDRFNASLGTYHDLLKIIKDKDFLDNEENEDILEDIVLTLTLFEDREMIEERLKTYAHLFDDKVMKQLKRRRYTGWGRLSRKLINGIRDKQSGKTILDFLKSDGFANRNFMQLIHDDSLTFKEDIQKAQVSGQGDSLHEHIANLAGSPAIKKGILQTVKVVDELVKVMGRHKPENIVIEMARENQTTQKGQKNSRERMKRIEEGIKELGSQILKEHPVENTQLQNEKLYLYYLQNGRDMYVDQELDINRLSDYDVDHIVPQSFLKDDSIDNKVLTRSDKNRGKSDNVPSEEVVKKMKNYWRQLLNAKLITQRKFDNLTKAERGGLSELDKAGFIKRQLVETRQITKHVAQILDSRMNTKYDENDKLIREVKVITLKSKLVSDFRKDFQFYKVREINNYHHAHDAYLNAVVGTALIKKYPKLESEFVYGDYKVYDVRKMIAKSEQEIGKATAKYFFYSGSSGSETPGTSESATPESSGSEVEFSHEYWMRHALTLAKRARDEREVPVGAVLVLNNRVIGEGWNRAIGLHDPTAHAEIMALRQGGLVMQNYRLIDATLYVTFEPCVMCAGAMIHSRIGRVVFGVRNAKTGAAGSLMDVLHYPGMNHRVEITEGILADECAALLCYFFRMPRQVFNAQKKAQSSTDNIMNFFKTEITLANGEIRKRPLIETNGETGEIVWDKGRDFATVRKVLSMPQVNIVKKTEVQTGGFSKESILPKRNSDKLIARKKDWDPKKYGGFDSPTVAYSVLVVAKVEKGKSKKLKSVKELLGITIMERSSFEKNPIDFLEAKGYKEVKKDLIIKLPKYSLFELENGRKRMLASAGELQKGNELALPSKYVNFLYLASHYEKLKGSPEDNEQKQLFVEQHKHYLDEIIEQISEFSKRVILADANLDKVLSAYNKHRDKPIREQAENIIHLFTLTNLGAPAAFKYFDTTIDRKRYTSTKEVLDATLIHQSITGLYETRIDLSQLGGD

SEQ ID NO: 267 - protein, 1554 aa, synthetic construct
  REGION 1..1554: note = 105 Cas9 TadAins 1068 polypeptide sequence
MDKKYSIGLAIGTNSVGWAVITDEYKVPSKKFKVLGNTDRHSIKKNLIGALLFDSGETAEATRLKRTARRRYTRRKNRICYLQEIFSNEMAKVDDSFFHRLEESFLVEEDKKHERHPIFGNIVDEVAYHEKYPTIYHLRKKLVDSTDKADLRLIYLALAHMIKFRGHFLIEGDLNPDNSDVDKLFIQLVQTYNQLFEENPINASGVDAKAILSARLSKSRRLENLIAQLPGEKKNGLFGNLIALSLGLTPNFKSNFDLAEDAKLQLSKDTYDDDLDNLLAQIGDQYADLFLAAKNLSDAILLSDILRVNTEITKAPLSASMIKRYDEHHQDLTLLKALVRQQLPEKYKEIFFDQSKNGYAGYIDGGASQEEFYKFIKPILEKMDGTEELLVKLNREDLLRKQRTFDNGSIPHQIHLGELHAILRRQEDFYPFLKDNREKIEKILTFRIPYYVGPLARGNSRFAWMTRKSEETITPWNFEEVVDKGASAQSFIERMTNFDKNLPNEKVLPKHSLLYEYFTVYNELTKVKYVTEGMRKPAFLSGEQKKAIVDLLFKTNRKVTVKQLKEDYFKKIECFDSVEISGVEDRFNASLGTYHDLLKIIKDKDFLDNEENEDILEDIVLTLTLFEDREMIEERLKTYAHLFDDKVMKQLKRRRYTGWGRLSRKLINGIRDKQSGKTILDFLKSDGFANRNFMQLIHDDSLTFKEDIQKAQVSGQGDSLHEHIANLAGSPAIKKGILQTVKVVDELVKVMGRHKPENIVIEMARENQTTQKGQKNSRERMKRIEEGIKELGSQILKEHPVENTQLQNEKLYLYYLQNGRDMYVDQELDINRLSDYDVDHIVPQSFLKDDSIDNKVLTRSDKNRGKSDNVPSEEVVKKMKNYWRQLLNAKLITQRKFDNLTKAERGGLSELDKAGFIKRQLVETRQITKHVAQILDSRMNTKYDENDKLIREVKVITLKSKLVSDFRKDFQFYKVREINNYHHAHDAYLNAVVGTALIKKYPKLESEFVYGDYKVYDVRKMIAKSEQEIGKATAKYFFYSNIMNFFKTEITLANGEIRKRPLIETNGEGSSGSETPGTSESATPESSGSEVEFSHEYWMRHALTLAKRARDEREVPVGAVLVLNNRVIGEGWNRAIGLHDPTAHAEIMALRQGGLVMQNYRLIDATLYVTFEPCVMCAGAMIHSRIGRVVFGVRNAKTGAAGSLMDVLHYPGMNHRVEITEGILADECAALLCYFFRMPRQVFNAQKKAQSSTDTGEIVWDKGRDFATVRKVLSMPQVNIVKKTEVQTGGFSKESILPKRNSDKLIARKKDWDPKKYGGFDSPTVAYSVLVVAKVEKGKSKKLKSVKELLGITIMERSSFEKNPIDFLEAKGYKEVKKDLIIKLPKYSLFELENGRKRMLASAGELQKGNELALPSKYVNFLYLASHYEKLKGSPEDNEQKQLFVEQHKHYLDEIIEQISEFSKRVILADANLDKVLSAYNKHRDKPIREQAENIIHLFTLTNLGAPAAFKYFDTTIDRKRYTSTKEVLDATLIHQSITGLYETRIDLSQLGGD

SEQ ID NO: 268 - protein, 1554 aa, synthetic construct
  REGION 1..1554: note = 106 Cas9 TadAins 1247 polypeptide sequence
MDKKYSIGLAIGTNSVGWAVITDEYKVPSKKFKVLGNTDRHSIKKNLIGALLFDSGETAEATRLKRTARRRYTRRKNRICYLQEIFSNEMAKVDDSFFHRLEESFLVEEDKKHERHPIFGNIVDEVAYHEKYPTIYHLRKKLVDSTDKADLRLIYLALAHMIKFRGHFLIEGDLNPDNSDVDKLFIQLVQTYNQLFEENPINASGVDAKAILSARLSKSRRLENLIAQLPGEKKNGLFGNLIALSLGLTPNFKSNFDLAEDAKLQLSKDTYDDDLDNLLAQIGDQYADLFLAAKNLSDAILLSDILRVNTEITKAPLSASMIKRYDEHHQDLTLLKALVRQQLPEKYKEIFFDQSKNGYAGYIDGGASQEEFYKFIKPILEKMDGTEELLVKLNREDLLRKQRTFDNGSIPHQIHLGELHAILRRQEDFYPFLKDNREKIEKILTFRIPYYVGPLARGNSRFAWMTRKSEETITPWNFEEVVDKGASAQSFIERMTNFDKNLPNEKVLPKHSLLYEYFTVYNELTKVKYVTEGMRKPAFLSGEQKKAIVDLLFKTNRKVTVKQLKEDYFKKIECFDSVEISGVEDRFNASLGTYHDLLKIIKDKDFLDNEENEDILEDIVLTLTLFEDREMIEERLKTYAHLFDDKVMKQLKRRRYTGWGRLSRKLINGIRDKQSGKTILDFLKSDGFANRNFMQLIHDDSLTFKEDIQKAQVSGQGDSLHEHIANLAGSPAIKKGILQTVKVVDELVKVMGRHKPENIVIEMARENQTTQKGQKNSRERMKRIEEGIKELGSQILKEHPVENTQLQNEKLYLYYLQNGRDMYVDQELDINRLSDYDVDHIVPQSFLKDDSIDNKVLTRSDKNRGKSDNVPSEEVVKKMKNYWRQLLNAKLITQRKFDNLTKAERGGLSELDKAGFIKRQLVETRQITKHVAQILDSRMNTKYDENDKLIREVKVITLKSKLVSDFRKDFQFYKVREINNYHHAHDAYLNAVVGTALIKKYPKLESEFVYGDYKVYDVRKMIAKSEQEIGKATAKYFFYSNIMNFFKTEITLANGEIRKRPLIETNGETGEIVWDKGRDFATVRKVLSMPQVNIVKKTEVQTGGFSKESILPKRNSDKLIARKKDWDPKKYGGFDSPTVAYSVLVVAKVEKGKSKKLKSVKELLGITIMERSSFEKNPIDFLEAKGYKEVKKDLIIKLPKYSLFELENGRKRMLASAGELQKGNELALPSKYVNFLYLASHYEKLKGGSSGSETPGTSESATPESSGSEVEFSHEYWMRHALTLAKRARDEREVPVGAVLVLNNRVIGEGWNRAIGLHDPTAHAEIMALRQGGLVMQNYRLIDATLYVTFEPCVMCAGAMIHSRIGRVVFGVRNAKTGAAGSLMDVLHYPGMNHRVEITEGILADECAALLCYFFRMPRQVFNAQKKAQSSTDSPEDNEQKQLFVEQHKHYLDEIIEQISEFSKRVILADANLDKVLSAYNKHRDKPIREQAENIIHLFTLTNLGAPAAFKYFDTTIDRKRYTSTKEVLDATLIHQSITGLYETRIDLSQLGGD

SEQ ID NO: 269 - protein, 1554 aa, synthetic construct
  REGION 1..1554: note = 107 Cas9 TadAins 1054 polypeptide sequence
MDKKYSIGLAIGTNSVGWAVITDEYKVPSKKFKVLGNTDRHSIKKNLIGALLFDSGETAEATRLKRTARRRYTRRKNRICYLQEIFSNEMAKVDDSFFHRLEESFLVEEDKKHERHPIFGNIVDEVAYHEKYPTIYHLRKKLVDSTDKADLRLIYLALAHMIKFRGHFLIEGDLNPDNSDVDKLFIQLVQTYNQLFEENPINASGVDAKAILSARLSKSRRLENLIAQLPGEKKNGLFGNLIALSLGLTPNFKSNFDLAEDAKLQLSKDTYDDDLDNLLAQIGDQYADLFLAAKNLSDAILLSDILRVNTEITKAPLSASMIKRYDEHHQDLTLLKALVRQQLPEKYKEIFFDQSKNGYAGYIDGGASQEEFYKFIKPILEKMDGTEELLVKLNREDLLRKQRTFDNGSIPHQIHLGELHAILRRQEDFYPFLKDNREKIEKILTFRIPYYVGPLARGNSRFAWMTRKSEETITPWNFEEVVDKGASAQSFIERMTNFDKNLPNEKVLPKHSLLYEYFTVYNELTKVKYVTEGMRKPAFLSGEQKKAIVDLLFKTNRKVTVKQLKEDYFKKIECFDSVEISGVEDRFNASLGTYHDLLKIIKDKDFLDNEENEDILEDIVLTLTLFEDREMIEERLKTYAHLFDDKVMKQLKRRRYTGWGRLSRKLINGIRDKQSGKTILDFLKSDGFANRNFMQLIHDDSLTFKEDIQKAQVSGQGDSLHEHIANLAGSPAIKKGILQTVKVVDELVKVMGRHKPENIVIEMARENQTTQKGQKNSRERMKRIEEGIKELGSQILKEHPVENTQLQNEKLYLYYLQNGRDMYVDQELDINRLSDYDVDHIVPQSFLKDDSIDNKVLTRSDKNRGKSDNVPSEEVVKKMKNYWRQLLNAKLITQRKFDNLTKAERGGLSELDKAGFIKRQLVETRQITKHVAQILDSRMNTKYDENDKLIREVKVITLKSKLVSDFRKDFQFYKVREINNYHHAHDAYLNAVVGTALIKKYPKLESEFVYGDYKVYDVRKMIAKSEQEIGKATAKYFFYSNIMNFFKTEITLANGSSGSETPGTSESATPESSGSEVEFSHEYWMRHALTLAKRARDEREVPVGAVLVLNNRVIGEGWNRAIGLHDPTAHAEIMALRQGGLVMQNYRLIDATLYVTFEPCVMCAGAMIHSRIGRVVFGVRNAKTGAAGSLMDVLHYPGMNHRVEITEGILADECAALLCYFFRMPRQVFNAQKKAQSSTDGEIRKRPLIETNGETGEIVWDKGRDFATVRKVLSMPQVNIVKKTEVQTGGFSKESILPKRNSDKLIARKKDWDPKKYGGFDSPTVAYSVLVVAKVEKGKSKKLKSVKELLGITIMERSSFEKNPIDFLEAKGYKEVKKDLIIKLPKYSLFELENGRKRMLASAGELQKGNELALPSKYVNFLYLASHYEKLKGSPEDNEQKQLFVEQHKHYLDEIIEQISEFSKRVILADANLDKVLSAYNKHRDKPIREQAENIIHLFTLTNLGAPAAFKYFDTTIDRKRYTSTKEVLDATLIHQSITGLYETRIDLSQLGGD

SEQ ID NO: 270 - protein, 1554 aa, synthetic construct
  REGION 1..1554: note = 108 Cas9 TadAins 1026 polypeptide sequence
MDKKYSIGLAIGTNSVGWAVITDEYKVPSKKFKVLGNTDRHSIKKNLIGALLFDSGETAEATRLKRTARRRYTRRKNRICYLQEIFSNEMAKVDDSFFHRLEESFLVEEDKKHERHPIFGNIVDEVAYHEKYPTIYHLRKKLVDSTDKADLRLIYLALAHMIKFRGHFLIEGDLNPDNSDVDKLFIQLVQTYNQLFEENPINASGVDAKAILSARLSKSRRLENLIAQLPGEKKNGLFGNLIALSLGLTPNFKSNFDLAEDAKLQLSKDTYDDDLDNLLAQIGDQYADLFLAAKNLSDAILLSDILRVNTEITKAPLSASMIKRYDEHHQDLTLLKALVRQQLPEKYKEIFFDQSKNGYAGYIDGGASQEEFYKFIKPILEKMDGTEELLVKLNREDLLRKQRTFDNGSIPHQIHLGELHAILRRQEDFYPFLKDNREKIEKILTFRIPYYVGPLARGNSRFAWMTRKSEETITPWNFEEVVDKGASAQSFIERMTNFDKNLPNEKVLPKHSLLYEYFTVYNELTKVKYVTEGMRKPAFLSGEQKKAIVDLLFKTNRKVTVKQLKEDYFKKIECFDSVEISGVEDRFNASLGTYHDLLKIIKDKDFLDNEENEDILEDIVLTLTLFEDREMIEERLKTYAHLFDDKVMKQLKRRRYTGWGRLSRKLINGIRDKQSGKTILDFLKSDGFANRNFMQLIHDDSLTFKEDIQKAQVSGQGDSLHEHIANLAGSPAIKKGILQTVKVVDELVKVMGRHKPENIVIEMARENQTTQKGQKNSRERMKRIEEGIKELGSQILKEHPVENTQLQNEKLYLYYLQNGRDMYVDQELDINRLSDYDVDHIVPQSFLKDDSIDNKVLTRSDKNRGKSDNVPSEEVVKKMKNYWRQLLNAKLITQRKFDNLTKAERGGLSELDKAGFIKRQLVETRQITKHVAQILDSRMNTKYDENDKLIREVKVITLKSKLVSDFRKDFQFYKVREINNYHHAHDAYLNAVVGTALIKKYPKLESEFVYGDYKVYDVRKMIAKSEGSSGSETPGTSESATPESSGSEVEFSHEYWMRHALTLAKRARDEREVPVGAVLVLNNRVIGEGWNRAIGLHDPTAHAEIMALRQGGLVMQNYRLIDATLYVTFEPCVMCAGAMIHSRIGRVVFGVRNAKTGAAGSLMDVLHYPGMNHRVEITEGILADECAALLCYFFRMPRQVFNAQKKAQSSTDQEIGKATAKYFFYSNIMNFFKTEITLANGEIRKRPLIETNGETGEIVWDKGRDFATVRKVLSMPQVNIVKKTEVQTGGFSKESILPKRNSDKLIARKKDWDPKKYGGFDSPTVAYSVLVVAKVEKGKSKKLKSVKELLGITIMERSSFEKNPIDFLEAKGYKEVKKDLIIKLPKYSLFELENGRKRMLASAGELQKGNELALPSKYVNFLYLASHYEKLKGSPEDNEQKQLFVEQHKHYLDEIIEQISEFSKRVILADANLDKVLSAYNKHRDKPIREQAENIIHLFTLTNLGAPAAFKYFDTTIDRKRYTSTKEVLDATLIHQSITGLYETRIDLSQLGGD

SEQ ID NO: 271 - protein, 1540 aa, synthetic construct
  REGION 1..1540: note = 109 Cas9 TadAins 768 polypeptide sequence
MDKKYSIGLAIGTNSVGWAVITDEYKVPSKKFKVLGNTDRHSIKKNLIGALLFDSGETAEATRLKRTARRRYTRRKNRICYLQEIFSNEMAKVDDSFFHRLEESFLVEEDKKHERHPIFGNIVDEVAYHEKYPTIYHLRKKLVDSTDKADLRLIYLALAHMIKFRGHFLIEGDLNPDNSDVDKLFIQLVQTYNQLFEENPINASGVDAKAILSARLSKSRRLENLIAQLPGEKKNGLFGNLIALSLGLTPNFKSNFDLAEDAKLQLSKDTYDDDLDNLLAQIGDQYADLFLAAKNLSDAILLSDILRVNTEITKAPLSASMIKRYDEHHQDLTLLKALVRQQLPEKYKEIFFDQSKNGYAGYIDGGASQEEFYKFIKPILEKMDGTEELLVKLNREDLLRKQRTFDNGSIPHQIHLGELHAILRRQEDFYPFLKDNREKIEKILTFRIPYYVGPLARGNSRFAWMTRKSEETITPWNFEEVVDKGASAQSFIERMTNFDKNLPNEKVLPKHSLLYEYFTVYNELTKVKYVTEGMRKPAFLSGEQKKAIVDLLFKTNRKVTVKQLKEDYFKKIECFDSVEISGVEDRFNASLGTYHDLLKIIKDKDFLDNEENEDILEDIVLTLTLFEDREMIEERLKTYAHLFDDKVMKQLKRRRYTGWGRLSRKLINGIRDKQSGKTILDFLKSDGFANRNFMQLIHDDSLTFKEDIQKAQVSGQGDSLHEHIANLAGSPAIKKGILQTVKVVDELVKVMGRHKPENIVIEMARENQGSSGSETPGTSESATPESSGSEVEFSHEYWMRHALTLAKRARDEREVPVGAVLVLNNRVIGEGWNRAIGLHDPTAHAEIMALRQGGLVMQNYRLIDATLYVTFEPCVMCAGAMIHSRIGRVVFGVRNAKTGAAGSLMDVLHYPGMNHRVEITEGILADECAALLCYFFRMPRTTQKGQKNSRERMKRIEEGIKELGSQILKEHPVENTQLQNEKLYLYYLQNGRDMYVDQELDINRLSDYDVDHIVPQSFLKDDSIDNKVLTRSDKNRGKSDNVPSEEVVKKMKNYWRQLLNAKLITQRKFDNLTKAERGGLSELDKAGFIKRQLVETRQITKHVAQILDSRMNTKYDENDKLIREVKVITLKSKLVSDFRKDFQFYKVREINNYHHAHDAYLNAVVGTALIKKYPKLESEFVYGDYKVYDVRKMIAKSEQEIGKATAKYFFYSNIMNFFKTEITLANGEIRKRPLIETNGETGEIVWDKGRDFATVRKVLSMPQVNIVKKTEVQTGGFSKESILPKRNSDKLIARKKDWDPKKYGGFDSPTVAYSVLVVAKVEKGKSKKLKSVKELLGITIMERSSFEKNPIDFLEAKGYKEVKKDLIIKLPKYSLFELENGRKRMLASAGELQKGNELALPSKYVNFLYLASHYEKLKGSPEDNEQKQLFVEQHKHYLDEIIEQISEFSKRVILADANLDKVLSAYNKHRDKPIREQAENIIHLFTLTNLGAPAAFKYFDTTIDRKRYTSTKEVLDATLIHQSITGLYETRIDLSQLGGD

SEQ ID NO: 272 - protein, 1540 aa, synthetic construct
  REGION 1..1540: note = 110.1 Cas9 TadAins 1250 polypeptide sequence
MDKKYSIGLAIGTNSVGWAVITDEYKVPSKKFKVLGNTDRHSIKKNLIGALLFDSGETAEATRLKRTARRRYTRRKNRICYLQEIFSNEMAKVDDSFFHRLEESFLVEEDKKHERHPIFGNIVDEVAYHEKYPTIYHLRKKLVDSTDKADLRLIYLALAHMIKFRGHFLIEGDLNPDNSDVDKLFIQLVQTYNQLFEENPINASGVDAKAILSARLSKSRRLENLIAQLPGEKKNGLFGNLIALSLGLTPNFKSNFDLAEDAKLQLSKDTYDDDLDNLLAQIGDQYADLFLAAKNLSDAILLSDILRVNTEITKAPLSASMIKRYDEHHQDLTLLKALVRQQLPEKYKEIFFDQSKNGYAGYIDGGASQEEFYKFIKPILEKMDGTEELLVKLNREDLLRKQRTFDNGSIPHQIHLGELHAILRRQEDFYPFLKDNREKIEKILTFRIPYYVGPLARGNSRFAWMTRKSEETITPWNFEEVVDKGASAQSFIERMTNFDKNLPNEKVLPKHSLLYEYFTVYNELTKVKYVTEGMRKPAFLSGEQKKAIVDLLFKTNRKVTVKQLKEDYFKKIECFDSVEISGVEDRFNASLGTYHDLLKIIKDKDFLDNEENEDILEDIVLTLTLFEDREMIEERLKTYAHLFDDKVMKQLKRRRYTGWGRLSRKLINGIRDKQSGKTILDFLKSDGFANRNFMQLIHDDSLTFKEDIQKAQVSGQGDSLHEHIANLAGSPAIKKGILQTVKVVDELVKVMGRHKPENIVIEMARENQTTQKGQKNSRERMKRIEEGIKELGSQILKEHPVENTQLQNEKLYLYYLQNGRDMYVDQELDINRLSDYDVDHIVPQSFLKDDSIDNKVLTRSDKNRGKSDNVPSEEVVKKMKNYWRQLLNAKLITQRKFDNLTKAERGGLSELDKAGFIKRQLVETRQITKHVAQILDSRMNTKYDENDKLIREVKVITLKSKLVSDFRKDFQFYKVREINNYHHAHDAYLNAVVGTALIKKYPKLESEFVYGDYKVYDVRKMIAKSEQEIGKATAKYFFYSNIMNFFKTEITLANGEIRKRPLIETNGETGEIVWDKGRDFATVRKVLSMPQVNIVKKTEVQTGGFSKESILPKRNSDKLIARKKDWDPKKYGGFDSPTVAYSVLVVAKVEKGKSKKLKSVKELLGITIMERSSFEKNPIDFLEAKGYKEVKKDLIIKLPKYSLFELENGRKRMLASAGELQKGNELALPSKYVNFLYLASHYEKLKGSPGSSGSETPGTSESATPESSGSEVEFSHEYWMRHALTLAKRARDEREVPVGAVLVLNNRVIGEGWNRAIGLHDPTAHAEIMALRQGGLVMQNYRLIDATLYVTFEPCVMCAGAMIHSRIGRVVFGVRNAKTGAAGSLMDVLHYPGMNHRVEITEGILADECAALLCYFFRMPREDNEQKQLFVEQHKHYLDEIIEQISEFSKRVILADANLDKVLSAYNKHRDKPIREQAENIIHLFTLTNLGAPAAFKYFDTTIDRKRYTSTKEVLDATLIHQSITGLYETRIDLSQLGGD

SEQ ID NO: 273 - protein, 1543 aa, synthetic construct
  REGION 1..1543: note = 110.2 Cas9 TadAins 1250 polypeptide sequence
MDKKYSIGLAIGTNSVGWAVITDEYKVPSKKFKVLGNTDRHSIKKNLIGALLFDSGETAEATRLKRTARRRYTRRKNRICYLQEIFSNEMAKVDDSFFHRLEESFLVEEDKKHERHPIFGNIVDEVAYHEKYPTIYHLRKKLVDSTDKADLRLIYLALAHMIKFRGHFLIEGDLNPDNSDVDKLFIQLVQTYNQLFEENPINASGVDAKAILSARLSKSRRLENLIAQLPGEKKNGLFGNLIALSLGLTPNFKSNFDLAEDAKLQLSKDTYDDDLDNLLAQIGDQYADLFLAAKNLSDAILLSDILRVNTEITKAPLSASMIKRYDEHHQDLTLLKALVRQQLPEKYKEIFFDQSKNGYAGYIDGGASQEEFYKFIKPILEKMDGTEELLVKLNREDLLRKQRTFDNGSIPHQIHLGELHAILRRQEDFYPFLKDNREKIEKILTFRIPYYVGPLARGNSRFAWMTRKSEETITPWNFEEVVDKGASAQSFIERMTNFDKNLPNEKVLPKHSLLYEYFTVYNELTKVKYVTEGMRKPAFLSGEQKKAIVDLLFKTNRKVTVKQLKEDYFKKIECFDSVEISGVEDRFNASLGTYHDLLKIIKDKDFLDNEENEDILEDIVLTLTLFEDREMIEERLKTYAHLFDDKVMKQLKRRRYTGWGRLSRKLINGIRDKQSGKTILDFLKSDGFANRNFMQLIHDDSLTFKEDIQKAQVSGQGDSLHEHIANLAGSPAIKKGILQTVKVVDELVKVMGRHKPENIVIEMARENQTTQKGQKNSRERMKRIEEGIKELGSQILKEHPVENTQLQNEKLYLYYLQNGRDMYVDQELDINRLSDYDVDHIVPQSFLKDDSIDNKVLTRSDKNRGKSDNVPSEEVVKKMKNYWRQLLNAKLITQRKFDNLTKAERGGLSELDKAGFIKRQLVETRQITKHVAQILDSRMNTKYDENDKLIREVKVITLKSKLVSDFRKDFQFYKVREINNYHHAHDAYLNAVVGTALIKKYPKLESEFVYGDYKVYDVRKMIAKSEQEIGKATAKYFFYSNIMNFFKTEITLANGEIRKRPLIETNGETGEIVWDKGRDFATVRKVLSMPQVNIVKKTEVQTGGFSKESILPKRNSDKLIARKKDWDPKKYGGFDSPTVAYSVLVVAKVEKGKSKKLKSVKELLGITIMERSSFEKNPIDFLEAKGYKEVKKDLIIKLPKYSLFELENGRKRMLASAGELQKGNELALPSKYVNFLYLASHYEKLKGSPGSSGSSGSETPGTSESATPESSGSEVEFSHEYWMRHALTLAKRARDEREVPVGAVLVLNNRVIGEGWNRAIGLHDPTAHAEIMALRQGGLVMQNYRLIDATLYVTFEPCVMCAGAMIHSRIGRVVFGVRNAKTGAAGSLMDVLHYPGMNHRVEITEGILADECAALLCYFFRMPREDNEQKQLFVEQHKHYLDEIIEQISEFSKRVILADANLDKVLSAYNKHRDKPIREQAENIIHLFTLTNLGAPAAFKYFDTTIDRKRYTSTKEVLDATLIHQSITGLYETRIDLSQLGGD

SEQ ID NO: 274 - protein, 1546 aa, synthetic construct
  REGION 1..1546: note = 110.3 Cas9 TadAins 1250 polypeptide sequence
MDKKYSIGLAIGTNSVGWAVITDEYKVPSKKFKVLGNTDRHSIKKNLIGALLFDSGETAEATRLKRTARRRYTRRKNRICYLQEIFSNEMAKVDDSFFHRLEESFLVEEDKKHERHPIFGNIVDEVAYHEKYPTIYHLRKKLVDSTDKADLRLIYLALAHMIKFRGHFLIEGDLNPDNSDVDKLFIQLVQTYNQLFEENPINASGVDAKAILSARLSKSRRLENLIAQLPGEKKNGLFGNLIALSLGLTPNFKSNFDLAEDAKLQLSKDTYDDDLDNLLAQIGDQYADLFLAAKNLSDAILLSDILRVNTEITKAPLSASMIKRYDEHHQDLTLLKALVRQQLPEKYKEIFFDQSKNGYAGYIDGGASQEEFYKFIKPILEKMDGTEELLVKLNREDLLRKQRTFDNGSIPHQIHLGELHAILRRQEDFYPFLKDNREKIEKILTFRIPYYVGPLARGNSRFAWMTRKSEETITPWNFEEVVDKGASAQSFIERMTNFDKNLPNEKVLPKHSLLYEYFTVYNELTKVKYVTEGMRKPAFLSGEQKKAIVDLLFKTNRKVTVKQLKEDYFKKIECFDSVEISGVEDRFNASLGTYHDLLKIIKDKDFLDNEENEDILEDIVLTLTLFEDREMIEERLKTYAHLFDDKVMKQLKRRRYTGWGRLSRKLINGIRDKQSGKTILDFLKSDGFANRNFMQLIHDDSLTFKEDIQKAQVSGQGDSLHEHIANLAGSPAIKKGILQTVKVVDELVKVMGRHKPENIVIEMARENQTTQKGQKNSRERMKRIEEGIKELGSQILKEHPVENTQLQNEKLYLYYLQNGRDMYVDQELDINRLSDYDVDHIVPQSFLKDDSIDNKVLTRSDKNRGKSDNVPSEEVVKKMKNYWRQLLNAKLITQRKFDNLTKAERGGLSELDKAGFIKRQLVETRQITKHVAQILDSRMNTKYDENDKLIREVKVITLKSKLVSDFRKDFQFYKVREINNYHHAHDAYLNAVVGTALIKKYPKLESEFVYGDYKVYDVRKMIAKSEQEIGKATAKYFFYSNIMNFFKTEITLANGEIRKRPLIETNGETGEIVWDKGRDFATVRKVLSMPQVNIVKKTEVQTGGFSKESILPKRNSDKLIARKKDWDPKKYGGFDSPTVAYSVLVVAKVEKGKSKKLKSVKELLGITIMERSSFEKNPIDFLEAKGYKEVKKDLIIKLPKYSLFELENGRKRMLASAGELQKGNELALPSKYVNFLYLASHYEKLKGSPGSSGSSGSETPGTSESATPESGSSSGSEVEFSHEYWMRHALTLAKRARDEREVPVGAVLVLNNRVIGEGWNRAIGLHDPTAHAEIMALRQGGLVMQNYRLIDATLYVTFEPCVMCAGAMIHSRIGRVVFGVRNAKTGAAGSLMDVLHYPGMNHRVEITEGILADECAALLCYFFRMPREDNEQKQLFVEQHKHYLDEIIEQISEFSKRVILADANLDKVLSAYNKHRDKPIREQAENIIHLFTLTNLGAPAAFKYFDTTIDRKRYTSTKEVLDATLIHQSITGLYETRIDLSQLGGD

SEQ ID NO: 275 - protein, 1546 aa, synthetic construct
  REGION 1..1546: note = 110.4 Cas9 TadAins 1250 polypeptide sequence
MDKKYSIGLAIGTNSVGWAVITDEYKVPSKKFKVLGNTDRHSIKKNLIGALLFDSGETAEATRLKRTARRRYTRRKNRICYLQEIFSNEMAKVDDSFFHRLEESFLVEEDKKHERHPIFGNIVDEVAYHEKYPTIYHLRKKLVDSTDKADLRLIYLALAHMIKFRGHFLIEGDLNPDNSDVDKLFIQLVQTYNQLFEENPINASGVDAKAILSARLSKSRRLENLIAQLPGEKKNGLFGNLIALSLGLTPNFKSNFDLAEDAKLQLSKDTYDDDLDNLLAQIGDQYADLFLAAKNLSDAILLSDILRVNTEITKAPLSASMIKRYDEHHQDLTLLKALVRQQLPEKYKEIFFDQSKNGYAGYIDGGASQEEFYKFIKPILEKMDGTEELLVKLNREDLLRKQRTFDNGSIPHQIHLGELHAILRRQEDFYPFLKDNREKIEKILTFRIPYYVGPLARGNSRFAWMTRKSEETITPWNFEEVVDKGASAQSFIERMTNFDKNLPNEKVLPKHSLLYEYFTVYNELTKVKYVTEGMRKPAFLSGEQKKAIVDLLFKTNRKVTVKQLKEDYFKKIECFDSVEISGVEDRFNASLGTYHDLLKIIKDKDFLDNEENEDILEDIVLTLTLFEDREMIEERLKTYAHLFDDKVMKQLKRRRYTGWGRLSRKLINGIRDKQSGKTILDFLKSDGFANRNFMQLIHDDSLTFKEDIQKAQVSGQGDSLHEHIANLAGSPAIKKGILQTVKVVDELVKVMGRHKPENIVIEMARENQTTQKGQKNSRERMKRIEEGIKELGSQILKEHPVENTQLQNEKLYLYYLQNGRDMYVDQELDINRLSDYDVDHIVPQSFLKDDSIDNKVLTRSDKNRGKSDNVPSEEVVKKMKNYWRQLLNAKLITQRKFDNLTKAERGGLSELDKAGFIKRQLVETRQITKHVAQILDSRMNTKYDENDKLIREVKVITLKSKLVSDFRKDFQFYKVREINNYHHAHDAYLNAVVGTALIKKYPKLESEFVYGDYKVYDVRKMIAKSEQEIGKATAKYFFYSNIMNFFKTEITLANGEIRKRPLIETNGETGEIVWDKGRDFATVRKVLSMPQVNIVKKTEVQTGGFSKESILPKRNSDKLIARKKDWDPKKYGGFDSPTVAYSVLVVAKVEKGKSKKLKSVKELLGITIMERSSFEKNPIDFLEAKGYKEVKKDLIIKLPKYSLFELENGRKRMLASAGELQKGNELALPSKYVNFLYLASHYEKLKGSPGSSGSSGSETPGTSESATPESGSSSGSEVEFSHEYWMRHALTLAKRARDEREVPVGAVLVLNNRVIGEGWNRAIGLHDPTAHAEIMALRQGGLVMQNYRLIDATLYVTFEPCVMCAGAMIHSRIGRVVFGVRNAKTGAAGSLMDVLHYPGMNHRVEITEGILADECAALLCYFFRMRREDNEQKQLFVEQHKHYLDEIIEQISEFSKRVILADANLDKVLSAYNKHRDKPIREQAENIIHLFTLTNLGAPAAFKYFDTTIDRKRYTSTKEVLDATLIHQSITGLYETRIDLSQLGGD

SEQ ID NO: 276 - protein, 1546 aa, synthetic construct
  REGION 1..1546: note = 110.5 Cas9 TadAins 1249 polypeptide sequence
MDKKYSIGLAIGTNSVGWAVITDEYKVPSKKFKVLGNTDRHSIKKNLIGALLFDSGETAEATRLKRTARRRYTRRKNRICYLQEIFSNEMAKVDDSFFHRLEESFLVEEDKKHERHPIFGNIVDEVAYHEKYPTIYHLRKKLVDSTDKADLRLIYLALAHMIKFRGHFLIEGDLNPDNSDVDKLFIQLVQTYNQLFEENPINASGVDAKAILSARLSKSRRLENLIAQLPGEKKNGLFGNLIALSLGLTPNFKSNFDLAEDAKLQLSKDTYDDDLDNLLAQIGDQYADLFLAAKNLSDAILLSDILRVNTEITKAPLSASMIKRYDEHHQDLTLLKALVRQQLPEKYKEIFFDQSKNGYAGYIDGGASQEEFYKFIKPILEKMDGTEELLVKLNREDLLRKQRTFDNGSIPHQIHLGELHAILRRQEDFYPFLKDNREKIEKILTFRIPYYVGPLARGNSRFAWMTRKSEETITPWNFEEVVDKGASAQSFIERMTNFDKNLPNEKVLPKHSLLYEYFTVYNELTKVKYVTEGMRKPAFLSGEQKKAIVDLLFKTNRKVTVKQLKEDYFKKIECFDSVEISGVEDRFNASLGTYHDLLKIIKDKDFLDNEENEDILEDIVLTLTLFEDREMIEERLKTYAHLFDDKVMKQLKRRRYTGWGRLSRKLINGIRDKQSGKTILDFLKSDGFANRNFMQLIHDDSLTFKEDIQKAQVSGQGDSLHEHIANLAGSPAIKKGILQTVKVVDELVKVMGRHKPENIVIEMARENQTTQKGQKNSRERMKRIEEGIKELGSQILKEHPVENTQLQNEKLYLYYLQNGRDMYVDQELDINRLSDYDVDHIVPQSFLKDDSIDNKVLTRSDKNRGKSDNVPSEEVVKKMKNYWRQLLNAKLITQRKFDNLTKAERGGLSELDKAGFIKRQLVETRQITKHVAQILDSRMNTKYDENDKLIREVKVITLKSKLVSDFRKDFQFYKVREINNYHHAHDAYLNAVVGTALIKKYPKLESEFVYGDYKVYDVRKMIAKSEQEIGKATAKYFFYSNIMNFFKTEITLANGEIRKRPLIETNGETGEIVWDKGRDFATVRKVLSMPQVNIVKKTEVQTGGFSKESILPKRNSDKLIARKKDWDPKKYGGFDSPTVAYSVLVVAKVEKGKSKKLKSVKELLGITIMERSSFEKNPIDFLEAKGYKEVKKDLIIKLPKYSLFELENGRKRMLASAGELQKGNELALPSKYVNFLYLASHYEKLKGSGSSGSSGSETPGTSESATPESGSSSGSEVEFSHEYWMRHALTLAKRARDEREVPVGAVLVLNNRVIGEGWNRAIGLHDPTAHAEIMALRQGGLVMQNYRLIDATLYVTFEPCVMCAGAMIHSRIGRVVFGVRNAKTGAAGSLMDVLHYPGMNHRVEITEGILADECAALLCYFFRMRRPEDNEQKQLFVEQHKHYLDEIIEQISEFSKRVILADANLDKVLSAYNKHRDKPIREQAENIIHLFTLTNLGAPAAFKYFDTTIDRKRYTSTKEVLDATLIHQSITGLYETRIDLSQLGGD

SEQ ID NO: 277 - protein, 1551 aa, synthetic construct
  REGION 1..1551: note = 110.5 Cas9 TadAins delta59-66 1250 polypeptide sequence
MDKKYSIGLAIGTNSVGWAVITDEYKVPSKKFKVLGNTDRHSIKKNLIGALLFDSGETAEATRLKRTARRRYTRRKNRICYLQEIFSNEMAKVDDSFFHRLEESFLVEEDKKHERHPIFGNIVDEVAYHEKYPTIYHLRKKLVDSTDKADLRLIYLALAHMIKFRGHFLIEGDLNPDNSDVDKLFIQLVQTYNQLFEENPINASGVDAKAILSARLSKSRRLENLIAQLPGEKKNGLFGNLIALSLGLTPNFKSNFDLAEDAKLQLSKDTYDDDLDNLLAQIGDQYADLFLAAKNLSDAILLSDILRVNTEITKAPLSASMIKRYDEHHQDLTLLKALVRQQLPEKYKEIFFDQSKNGYAGYIDGGASQEEFYKFIKPILEKMDGTEELLVKLNREDLLRKQRTFDNGSIPHQIHLGELHAILRRQEDFYPFLKDNREKIEKILTFRIPYYVGPLARGNSRFAWMTRKSEETITPWNFEEVVDKGASAQSFIERMTNFDKNLPNEKVLPKHSLLYEYFTVYNELTKVKYVTEGMRKPAFLSGEQKKAIVDLLFKTNRKVTVKQLKEDYFKKIECFDSVEISGVEDRFNASLGTYHDLLKIIKDKDFLDNEENEDILEDIVLTLTLFEDREMIEERLKTYAHLFDDKVMKQLKRRRYTGWGRLSRKLINGIRDKQSGKTILDFLKSDGFANRNFMQLIHDDSLTFKEDIQKAQVSGQGDSLHEHIANLAGSPAIKKGILQTVKVVDELVKVMGRHKPENIVIEMARENQTTQKGQKNSRERMKRIEEGIKELGSQILKEHPVENTQLQNEKLYLYYLQNGRDMYVDQELDINRLSDYDVDHIVPQSFLKDDSIDNKVLTRSDKNRGKSDNVPSEEVVKKMKNYWRQLLNAKLITQRKFDNLTKAERGGLSELDKAGFIKRQLVETRQITKHVAQILDSRMNTKYDENDKLIREVKVITLKSKLVSDFRKDFQFYKVREINNYHHAHDAYLNAVVGTALIKKYPKLESEFVYGDYKVYDVRKMIAKSEQEIGKATAKYFFYSNIMNFFKTEITLANGEIRKRPLIETNGETGEIVWDKGRDFATVRKVLSMPQVNIVKKTEVQTGGFSKESILPKRNSDKLIARKKDWDPKKYGGFDSPTVAYSVLVVAKVEKGKSKKLKSVKELLGITIMERSSFEKNPIDFLEAKGYKEVKKDLIIKLPKYSLFELENGRKRMLASAGELQKGNELALPSKYVNFLYLASHYEKLKGSPGSSGSSGSETPGTSESATPESGSSGSEVEFSHEYWMRHALTLAKRARDEREVPVGAVLVLNNRVIGEGWNRAHAEIMALRQGGLVMQNYRLIDATLYVTFEPCVMCAGAMIHSRIGRVVFGVRNAKTGAAGSLMDVLHYPGMNHRVEITEGILADECAALLCYFFRMPRQVFNAQKKAQSSTDEDNEQKQLFVEQHKHYLDEIIEQISEFSKRVILADANLDKVLSAYNKHRDKPIREQAENIIHLFTLTNLGAPAAFKYFDTTIDRKRYTSTKEVLDATLIHQSITGLYETRIDLSQLGGD

SEQ ID NO: 278 - protein, 1546 aa, synthetic construct
  REGION 1..1546: note = 110.6 Cas9 TadAins 1251 polypeptide sequence
MDKKYSIGLAIGTNSVGWAVITDEYKVPSKKFKVLGNTDRHSIKKNLIGALLFDSGETAEATRLKRTARRRYTRRKNRICYLQEIFSNEMAKVDDSFFHRLEESFLVEEDKKHERHPIFGNIVDEVAYHEKYPTIYHLRKKLVDSTDKADLRLIYLALAHMIKFRGHFLIEGDLNPDNSDVDKLFIQLVQTYNQLFEENPINASGVDAKAILSARLSKSRRLENLIAQLPGEKKNGLFGNLIALSLGLTPNFKSNFDLAEDAKLQLSKDTYDDDLDNLLAQIGDQYADLFLAAKNLSDAILLSDILRVNTEITKAPLSASMIKRYDEHHQDLTLLKALVRQQLPEKYKEIFFDQSKNGYAGYIDGGASQEEFYKFIKPILEKMDGTEELLVKLNREDLLRKQRTFDNGSIPHQIHLGELHAILRRQEDFYPFLKDNREKIEKILTFRIPYYVGPLARGNSRFAWMTRKSEETITPWNFEEVVDKGASAQSFIERMTNFDKNLPNEKVLPKHSLLYEYFTVYNELTKVKYVTEGMRKPAFLSGEQKKAIVDLLFKTNRKVTVKQLKEDYFKKIECFDSVEISGVEDRFNASLGTYHDLLKIIKDKDFLDNEENEDILEDIVLTLTLFEDREMIEERLKTYAHLFDDKVMKQLKRRRYTGWGRLSRKLINGIRDKQSGKTILDFLKSDGFANRNFMQLIHDDSLTFKEDIQKAQVSGQGDSLHEHIANLAGSPAIKKGILQTVKVVDELVKVMGRHKPENIVIEMARENQTTQKGQKNSRERMKRIEEGIKELGSQILKEHPVENTQLQNEKLYLYYLQNGRDMYVDQELDINRLSDYDVDHIVPQSFLKDDSIDNKVLTRSDKNRGKSDNVPSEEVVKKMKNYWRQLLNAKLITQRKFDNLTKAERGGLSELDKAGFIKRQLVETRQITKHVAQILDSRMNTKYDENDKLIREVKVITLKSKLVSDFRKDFQFYKVREINNYHHAHDAYLNAVVGTALIKKYPKLESEFVYGDYKVYDVRKMIAKSEQEIGKATAKYFFYSNIMNFFKTEITLANGEIRKRPLIETNGETGEIVWDKGRDFATVRKVLSMPQVNIVKKTEVQTGGFSKESILPKRNSDKLIARKKDWDPKKYGGFDSPTVAYSVLVVAKVEKGKSKKLKSVKELLGITIMERSSFEKNPIDFLEAKGYKEVKKDLIIKLPKYSLFELENGRKRMLASAGELQKGNELALPSKYVNFLYLASHYEKLKGSPEGSSGSSGSETPGTSESATPESGSSSGSEVEFSHEYWMRHALTLAKRARDEREVPVGAVLVLNNRVIGEGWNRAIGLHDPTAHAEIMALRQGGLVMQNYRLIDATLYVTFEPCVMCAGAMIHSRIGRVVFGVRNAKTGAAGSLMDVLHYPGMNHRVEITEGILADECAALLCYFFRMRRDNEQKQLFVEQHKHYLDEIIEQISEFSKRVILADANLDKVLSAYNKHRDKPIREQAENIIHLFTLTNLGAPAAFKYFDTTIDRKRYTSTKEVLDATLIHQSITGLYETRIDLSQLGGD

SEQ ID NO: 279 - protein, 1546 aa, synthetic construct
  REGION 1..1546: note = 110.7 Cas9 TadAins 1252 polypeptide sequence
MDKKYSIGLAIGTNSVGWAVITDEYKVPSKKFKVLGNTDRHSIKKNLIGALLFDSGETAEATRLKRTARRRYTRRKNRICYLQEIFSNEMAKVDDSFFHRLEESFLVEEDKKHERHPIFGNIVDEVAYHEKYPTIYHLRKKLVDSTDKADLRLIYLALAHMIKFRGHFLIEGDLNPDNSDVDKLFIQLVQTYNQLFEENPINASGVDAKAILSARLSKSRRLENLIAQLPGEKKNGLFGNLIALSLGLTPNFKSNFDLAEDAKLQLSKDTYDDDLDNLLAQIGDQYADLFLAAKNLSDAILLSDILRVNTEITKAPLSASMIKRYDEHHQDLTLLKALVRQQLPEKYKEIFFDQSKNGYAGYIDGGASQEEFYKFIKPILEKMDGTEELLVKLNREDLLRKQRTFDNGSIPHQIHLGELHAILRRQEDFYPFLKDNREKIEKILTFRIPYYVGPLARGNSRFAWMTRKSEETITPWNFEEVVDKGASAQSFIERMTNFDKNLPNEKVLPKHSLLYEYFTVYNELTKVKYVTEGMRKPAFLSGEQKKAIVDLLFKTNRKVTVKQLKEDYFKKIECFDSVEISGVEDRFNASLGTYHDLLKIIKDKDFLDNEENEDILEDIVLTLTLFEDREMIEERLKTYAHLFDDKVMKQLKRRRYTGWGRLSRKLINGIRDKQSGKTILDFLKSDGFANRNFMQLIHDDSLTFKEDIQKAQVSGQGDSLHEHIANLAGSPAIKKGILQTVKVVDELVKVMGRHKPENIVIEMARENQTTQKGQKNSRERMKRIEEGIKELGSQILKEHPVENTQLQNEKLYLYYLQNGRDMYVDQELDINRLSDYDVDHIVPQSFLKDDSIDNKVLTRSDKNRGKSDNVPSEEVVKKMKNYWRQLLNAKLITQRKFDNLTKAERGGLSELDKAGFIKRQLVETRQITKHVAQILDSRMNTKYDENDKLIREVKVITLKSKLVSDFRKDFQFYKVREINNYHHAHDAYLNAVVGTALIKKYPKLESEFVYGDYKVYDVRKMIAKSEQEIGKATAKYFFYSNIMNFFKTEITLANGEIRKRPLIETNGETGEIVWDKGRDFATVRKVLSMPQVNIVKKTEVQTGGFSKESILPKRNSDKLIARKKDWDPKKYGGFDSPTVAYSVLVVAKVEKGKSKKLKSVKELLGITIMERSSFEKNPIDFLEAKGYKEVKKDLIIKLPKYSLFELENGRKRMLASAGELQKGNELALPSKYVNFLYLASHYEKLKGSPEDGSSGSSGSETPGTSESATPESGSSSGSEVEFSHEYWMRHALTLAKRARDEREVPVGAVLVLNNRVIGEGWNRAIGLHDPTAHAEIMALRQGGLVMQNYRLIDATLYVTFEPCVMCAGAMIHSRIGRVVFGVRNAKTGAAGSLMDVLHYPGMNHRVEITEGILADECAALLCYFFRMRRNEQKQLFVEQHKHYLDEIIEQISEFSKRVILADANLDKVLSAYNKHRDKPIREQAENIIHLFTLTNLGAPAAFKYFDTTIDRKRYTSTKEVLDATLIHQSITGLYETRIDLSQLGGD

SEQ ID NO: 280 - protein, 1533 aa, synthetic construct
  REGION 1..1533: note = 110.8 Cas9 TadAins delta59-66 C-truncate 1250 polypeptide sequence
MDKKYSIGLAIGTNSVGWAVITDEYKVPSKKFKVLGNTDRHSIKKNLIGALLFDSGETAEATRLKRTARRRYTRRKNRICYLQEIFSNEMAKVDDSFFHRLEESFLVEEDKKHERHPIFGNIVDEVAYHEKYPTIYHLRKKLVDSTDKADLRLIYLALAHMIKFRGHFLIEGDLNPDNSDVDKLFIQLVQTYNQLFEENPINASGVDAKAILSARLSKSRRLENLIAQLPGEKKNGLFGNLIALSLGLTPNFKSNFDLAEDAKLQLSKDTYDDDLDNLLAQIGDQYADLFLAAKNLSDAILLSDILRVNTEITKAPLSASMIKRYDEHHQDLTLLKALVRQQLPEKYKEIFFDQSKNGYAGYIDGGASQEEFYKFIKPILEKMDGTEELLVKLNREDLLRKQRTFDNGSIPHQIHLGELHAILRRQEDFYPFLKDNREKIEKILTFRIPYYVGPLARGNSRFAWMTRKSEETITPWNFEEVVDKGASAQSFIERMTNFDKNLPNEKVLPKHSLLYEYFTVYNELTKVKYVTEGMRKPAFLSGEQKKAIVDLLFKTNRKVTVKQLKEDYFKKIECFDSVEISGVEDRFNASLGTYHDLLKIIKDKDFLDNEENEDILEDIVLTLTLFEDREMIEERLKTYAHLFDDKVMKQLKRRRYTGWGRLSRKLINGIRDKQSGKTILDFLKSDGFANRNFMQLIHDDSLTFKEDIQKAQVSGQGDSLHEHIANLAGSPAIKKGILQTVKVVDELVKVMGRHKPENIVIEMARENQTTQKGQKNSRERMKRIEEGIKELGSQILKEHPVENTQLQNEKLYLYYLQNGRDMYVDQELDINRLSDYDVDHIVPQSFLKDDSIDNKVLTRSDKNRGKSDNVPSEEVVKKMKNYWRQLLNAKLITQRKFDNLTKAERGGLSELDKAGFIKRQLVETRQITKHVAQILDSRMNTKYDENDKLIREVKVITLKSKLVSDFRKDFQFYKVREINNYHHAHDAYLNAVVGTALIKKYPKLESEFVYGDYKVYDVRKMIAKSEQEIGKATAKYFFYSNIMNFFKTEITLANGEIRKRPLIETNGETGEIVWDKGRDFATVRKVLSMPQVNIVKKTEVQTGGFSKESILPKRNSDKLIARKKDWDPKKYGGFDSPTVAYSVLVVAKVEKGKSKKLKSVKELLGITIMERSSFEKNPIDFLEAKGYKEVKKDLIIKLPKYSLFELENGRKRMLASAGELQKGNELALPSKYVNFLYLASHYEKLKGSPGSSGSETPGTSESATPESSGSEVEFSHEYWMRHALTLAKRARDEREVPVGAVLVLNNRVIGEGWNRAHAEIMALRQGGLVMQNYRLIDATLYVTFEPCVMCAGAMIHSRIGRVVFGVRNAKTGAAGSLMDVLHYPGMNHRVEITEGILADECAALLCYFFRMPRQEDNEQKQLFVEQHKHYLDEIIEQISEFSKRVILADANLDKVLSAYNKHRDKPIREQAENIIHLFTLTNLGAPAAFKYFDTTIDRKRYTSTKEVLDATLIHQSITGLYETRIDLSQLGGD

SEQ ID NO: 281 - protein, 1549 aa, synthetic construct
  REGION 1..1549: note = 111.1 Cas9 TadAins 997 polypeptide sequence
MDKKYSIGLAIGTNSVGWAVITDEYKVPSKKFKVLGNTDRHSIKKNLIGALLFDSGETAEATRLKRTARRRYTRRKNRICYLQEIFSNEMAKVDDSFFHRLEESFLVEEDKKHERHPIFGNIVDEVAYHEKYPTIYHLRKKLVDSTDKADLRLIYLALAHMIKFRGHFLIEGDLNPDNSDVDKLFIQLVQTYNQLFEENPINASGVDAKAILSARLSKSRRLENLIAQLPGEKKNGLFGNLIALSLGLTPNFKSNFDLAEDAKLQLSKDTYDDDLDNLLAQIGDQYADLFLAAKNLSDAILLSDILRVNTEITKAPLSASMIKRYDEHHQDLTLLKALVRQQLPEKYKEIFFDQSKNGYAGYIDGGASQEEFYKFIKPILEKMDGTEELLVKLNREDLLRKQRTFDNGSIPHQIHLGELHAILRRQEDFYPFLKDNREKIEKILTFRIPYYVGPLARGNSRFAWMTRKSEETITPWNFEEVVDKGASAQSFIERMTNFDKNLPNEKVLPKHSLLYEYFTVYNELTKVKYVTEGMRKPAFLSGEQKKAIVDLLFKTNRKVTVKQLKEDYFKKIECFDSVEISGVEDRFNASLGTYHDLLKIIKDKDFLDNEENEDILEDIVLTLTLFEDREMIEERLKTYAHLFDDKVMKQLKRRRYTGWGRLSRKLINGIRDKQSGKTILDFLKSDGFANRNFMQLIHDDSLTFKEDIQKAQVSGQGDSLHEHIANLAGSPAIKKGILQTVKVVDELVKVMGRHKPENIVIEMARENQTTQKGQKNSRERMKRIEEGIKELGSQILKEHPVENTQLQNEKLYLYYLQNGRDMYVDQELDINRLSDYDVDHIVPQSFLKDDSIDNKVLTRSDKNRGKSDNVPSEEVVKKMKNYWRQLLNAKLITQRKFDNLTKAERGGLSELDKAGFIKRQLVETRQITKHVAQILDSRMNTKYDENDKLIREVKVITLKSKLVSDFRKDFQFYKVREINNYHHAHDAYLNAVVGTALSHEYWMRHALTLAKRARDEREVPVGAVLVLNNRVIGEGWNRAIGLHDPTAHAEIMALRQGGLVMQNYRLIDATLYVTFEPCVMCAGAMIHSRIGRVVFGVRNAKTGAAGSLMDVLHYPGMNHRVEITEGILADECAALLCYFFRMPRQVFNAQKKAQSSTDGSSGSETPGTSESATPESSGIKKYPKLESEFVYGDYKVYDVRKMIAKSEQEIGKATAKYFFYSNIMNFFKTEITLANGEIRKRPLIETNGETGEIVWDKGRDFATVRKVLSMPQVNIVKKTEVQTGGFSKESILPKRNSDKLIARKKDWDPKKYGGFDSPTVAYSVLVVAKVEKGKSKKLKSVKELLGITIMERSSFEKNPIDFLEAKGYKEVKKDLIIKLPKYSLFELENGRKRMLASAGELQKGNELALPSKYVNFLYLASHYEKLKGSPEDNEQKQLFVEQHKHYLDEIIEQISEFSKRVILADANLDKVLSAYNKHRDKPIREQAENIIHLFTLTNLGAPAAFKYFDTTIDRKRYTSTKEVLDATLIHQSITGLYETRIDLSQLGGD

SEQ ID NO: 282 - protein, 1555 aa, synthetic construct
  REGION 1..1555: note = 111.2 Cas9 TadAins 997 polypeptide sequence
MDKKYSIGLAIGTNSVGWAVITDEYKVPSKKFKVLGNTDRHSIKKNLIGALLFDSGETAEATRLKRTARRRYTRRKNRICYLQEIFSNEMAKVDDSFFHRLEESFLVEEDKKHERHPIFGNIVDEVAYHEKYPTIYHLRKKLVDSTDKADLRLIYLALAHMIKFRGHFLIEGDLNPDNSDVDKLFIQLVQTYNQLFEENPINASGVDAKAILSARLSKSRRLENLIAQLPGEKKNGLFGNLIALSLGLTPNFKSNFDLAEDAKLQLSKDTYDDDLDNLLAQIGDQYADLFLAAKNLSDAILLSDILRVNTEITKAPLSASMIKRYDEHHQDLTLLKALVRQQLPEKYKEIFFDQSKNGYAGYIDGGASQEEFYKFIKPILEKMDGTEELLVKLNREDLLRKQRTFDNGSIPHQIHLGELHAILRRQEDFYPFLKDNREKIEKILTFRIPYYVGPLARGNSRFAWMTRKSEETITPWNFEEVVDKGASAQSFIERMTNFDKNLPNEKVLPKHSLLYEYFTVYNELTKVKYVTEGMRKPAFLSGEQKKAIVDLLFKTNRKVTVKQLKEDYFKKIECFDSVEISGVEDRFNASLGTYHDLLKIIKDKDFLDNEENEDILEDIVLTLTLFEDREMIEERLKTYAHLFDDKVMKQLKRRRYTGWGRLSRKLINGIRDKQSGKTILDFLKSDGFANRNFMQLIHDDSLTFKEDIQKAQVSGQGDSLHEHIANLAGSPAIKKGILQTVKVVDELVKVMGRHKPENIVIEMARENQTTQKGQKNSRERMKRIEEGIKELGSQILKEHPVENTQLQNEKLYLYYLQNGRDMYVDQELDINRLSDYDVDHIVPQSFLKDDSIDNKVLTRSDKNRGKSDNVPSEEVVKKMKNYWRQLLNAKLITQRKFDNLTKAERGGLSELDKAGFIKRQLVETRQITKHVAQILDSRMNTKYDENDKLIREVKVITLKSKLVSDFRKDFQFYKVREINNYHHAHDAYLNAVVGTALSHEYWMRHALTLAKRARDEREVPVGAVLVLNNRVIGEGWNRAIGLHDPTAHAEIMALRQGGLVMQNYRLIDATLYVTFEPCVMCAGAMIHSRIGRVVFGVRNAKTGAAGSLMDVLHYPGMNHRVEITEGILADECAALLCYFFRMPRQVFNAQKKAQSSTDGSSGSSGSETPGTSESATPESSGGSSIKKYPKLESEFVYGDYKVYDVRKMIAKSEQEIGKATAKYFFYSNIMNFFKTEITLANGEIRKRPLIETNGETGEIVWDKGRDFATVRKVLSMPQVNIVKKTEVQTGGFSKESILPKRNSDKLIARKKDWDPKKYGGFDSPTVAYSVLVVAKVEKGKSKKLKSVKELLGITIMERSSFEKNPIDFLEAKGYKEVKKDLIIKLPKYSLFELENGRKRMLASAGELQKGNELALPSKYVNFLYLASHYEKLKGSPEDNEQKQLFVEQHKHYLDEIIEQISEFSKRVILADANLDKVLSAYNKHRDKPIREQAENIIHLFTLTNLGAPAAFKYFDTTIDRKRYTSTKEVLDATLIHQSITGLYETRIDLSQLGGD

SEQ ID NO: 283 - protein, 1421 aa, synthetic construct
  REGION 1..1421: note = 112 delta HNH TadA polypeptide sequence
MDKKYSIGLAIGTNSVGWAVITDEYKVPSKKFKVLGNTDRHSIKKNLIGALLFDSGETAEATRLKRTARRRYTRRKNRICYLQEIFSNEMAKVDDSFFHRLEESFLVEEDKKHERHPIFGNIVDEVAYHEKYPTIYHLRKKLVDSTDKADLRLIYLALAHMIKFRGHFLIEGDLNPDNSDVDKLFIQLVQTYNQLFEENPINASGVDAKAILSARLSKSRRLENLIAQLPGEKKNGLFGNLIALSLGLTPNFKSNFDLAEDAKLQLSKDTYDDDLDNLLAQIGDQYADLFLAAKNLSDAILLSDILRVNTEITKAPLSASMIKRYDEHHQDLTLLKALVRQQLPEKYKEIFFDQSKNGYAGYIDGGASQEEFYKFIKPILEKMDGTEELLVKLNREDLLRKQRTFDNGSIPHQIHLGELHAILRRQEDFYPFLKDNREKIEKILTFRIPYYVGPLARGNSRFAWMTRKSEETITPWNFEEVVDKGASAQSFIERMTNFDKNLPNEKVLPKHSLLYEYFTVYNELTKVKYVTEGMRKPAFLSGEQKKAIVDLLFKTNRKVTVKQLKEDYFKKIECFDSVEISGVEDRFNASLGTYHDLLKIIKDKDFLDNEENEDILEDIVLTLTLFEDREMIEERLKTYAHLFDDKVMKQLKRRRYTGWGRLSRKLINGIRDKQSGKTILDFLKSDGFANRNFMQLIHDDSLTFKEDIQKAQVSGQGDSLHEHIANLAGSPAIKKGILQTVKVVDELVKVMGRHKPENIVIEMARENQTTQKGQKNSRERMKRIEEGIKELGSEVEFSHEYWMRHALTLAKRARDEREVPVGAVLVLNNRVIGEGWNRAIGLHDPTAHAEIMALRQGGLVMQNYRLIDATLYVTFEPCVMCAGAMIHSRIGRVVFGVRNAKTGAAGSLMDVLHYPGMNHRVEITEGILADECAALLCYFFRMPRQVFNAQKKAQSSTDGGLSELDKAGFIKRQLVETRQITKHVAQILDSRMNTKYDENDKLIREVKVITLKSKLVSDFRKDFQFYKVREINNYHHAHDAYLNAVVGTALIKKYPKLESEFVYGDYKVYDVRKMIAKSEQEIGKATAKYFFYSNIMNFFKTEITLANGEIRKRPLIETNGETGEIVWDKGRDFATVRKVLSMPQVNIVKKTEVQTGGFSKESILPKRNSDKLIARKKDWDPKKYGGFDSPTVAYSVLVVAKVEKGKSKKLKSVKELLGITIMERSSFEKNPIDFLEAKGYKEVKKDLIIKLPKYSLFELENGRKRMLASAGELQKGNELALPSKYVNFLYLASHYEKLKGSPEDNEQKQLFVEQHKHYLDEIIEQISEFSKRVILADANLDKVLSAYNKHRDKPIREQAENIIHLFTLTNLGAPAAFKYFDTTIDRKRYTSTKEVLDATLIHQSITGLYETRIDLSQLGGD

SEQ ID NO: 284 - protein, 1552 aa, synthetic construct
  REGION 1..1552: note = 113 N-term single TadA helixtrunc 165-end polypeptide sequence
MSEVEFSHEYWMRHALTLAKRARDEREVPVGAVLVLNNRVIGEGWNRAIGLHDPTAHAEIMALRQGGLVMQNYRLIDATLYVTFEPCVMCAGAMIHSRIGRVVFGVRNAKTGAAGSLMDVLHYPGMNHRVEITEGILADECAALLCYFFRMPRSGGSSGGSSGSETPGTSESATPESSGGSSGGSDKKYSIGLAIGTNSVGWAVITDEYKVPSKKFKVLGNTDRHSIKKNLIGALLFDSGETAEATRLKRTARRRYTRRKNRICYLQEIFSNEMAKVDDSFFHRLEESFLVEEDKKHERHPIFGNIVDEVAYHEKYPTIYHLRKKLVDSTDKADLRLIYLALAHMIKFRGHFLIEGDLNPDNSDVDKLFIQLVQTYNQLFEENPINASGVDAKAILSARLSKSRRLENLIAQLPGEKKNGLFGNLIALSLGLTPNFKSNFDLAEDAKLQLSKDTYDDDLDNLLAQIGDQYADLFLAAKNLSDAILLSDILRVNTEITKAPLSASMIKRYDEHHQDLTLLKALVRQQLPEKYKEIFFDQSKNGYAGYIDGGASQEEFYKFIKPILEKMDGTEELLVKLNREDLLRKQRTFDNGSIPHQIHLGELHAILRRQEDFYPFLKDNREKIEKILTFRIPYYVGPLARGNSRFAWMTRKSEETITPWNFEEVVDKGASAQSFIERMTNFDKNLPNEKVLPKHSLLYEYFTVYNELTKVKYVTEGMRKPAFLSGEQKKAIVDLLFKTNRKVTVKQLKEDYFKKIECFDSVEISGVEDRFNASLGTYHDLLKIIKDKDFLDNEENEDILEDIVLTLTLFEDREMIEERLKTYAHLFDDKVMKQLKRRRYTGWGRLSRKLINGIRDKQSGKTILDFLKSDGFANRNFMQLIHDDSLTFKEDIQKAQVSGQGDSLHEHIANLAGSPAIKKGILQTVKVVDELVKVMGRHKPENIVIEMARENQTTQKGQKNSRERMKRIEEGIKELGSQILKEHPVENTQLQNEKLYLYYLQNGRDMYVDQELDINRLSDYDVDHIVPQSFLKDDSIDNKVLTRSDKNRGKSDNVPSEEVVKKMKNYWRQLLNAKLITQRKFDNLTKAERGGLSELDKAGFIKRQLVETRQITKHVAQILDSRMNTKYDENDKLIREVKVITLKSKLVSDFRKDFQFYKVREINNYHHAHDAYLNAVVGTALIKKYPKLESEFVYGDYKVYDVRKMIAKSEQEIGKATAKYFFYSNIMNFFKTEITLANGEIRKRPLIETNGETGEIVWDKGRDFATVRKVLSMPQVNIVKKTEVQTGGFSKESILPKRNSDKLIARKKDWDPKKYGGFDSPTVAYSVLVVAKVEKGKSKKLKSVKELLGITIMERSSFEKNPIDFLEAKGYKEVKKDLIIKLPKYSLFELENGRKRMLASAGELQKGNELALPSKYVNFLYLASHYEKLKGSPEDNEQKQLFVEQHKHYLDEIIEQISEFSKRVILADANLDKVLSAYNKHRDKPIREQAENIIHLFTLTNLGAPAAFKYFDTTIDRKRYTSTKEVLDATLIHQSITGLYETRIDLSQLGGD

SEQ ID NO: 285 - protein, 1545 aa, synthetic construct
  REGION 1..1545: note = 114 N-term single TadA helixtrunc 165-end delta 59-65 polypeptide sequence
MSEVEFSHEYWMRHALTLAKRARDEREVPVGAVLVLNNRVIGEGWNRTAHAEIMALRQGGLVMQNYRLIDATLYVTFEPCVMCAGAMIHSRIGRVVFGVRNAKTGAAGSLMDVLHYPGMNHRVEITEGILADECAALLCYFFRMPRSGGSSGGSSGSETPGTSESATPESSGGSSGGSDKKYSIGLAIGTNSVGWAVITDEYKVPSKKFKVLGNTDRHSIKKNLIGALLFDSGETAEATRLKRTARRRYTRRKNRICYLQEIFSNEMAKVDDSFFHRLEESFLVEEDKKHERHPIFGNIVDEVAYHEKYPTIYHLRKKLVDSTDKADLRLIYLALAHMIKFRGHFLIEGDLNPDNSDVDKLFIQLVQTYNQLFEENPINASGVDAKAILSARLSKSRRLENLIAQLPGEKKNGLFGNLIALSLGLTPNFKSNFDLAEDAKLQLSKDTYDDDLDNLLAQIGDQYADLFLAAKNLSDAILLSDILRVNTEITKAPLSASMIKRYDEHHQDLTLLKALVRQQLPEKYKEIFFDQSKNGYAGYIDGGASQEEFYKFIKPILEKMDGTEELLVKLNREDLLRKQRTFDNGSIPHQIHLGELHAILRRQEDFYPFLKDNREKIEKILTFRIPYYVGPLARGNSRFAWMTRKSEETITPWNFEEVVDKGASAQSFIERMTNFDKNLPNEKVLPKHSLLYEYFTVYNELTKVKYVTEGMRKPAFLSGEQKKAIVDLLFKTNRKVTVKQLKEDYFKKIECFDSVEISGVEDRFNASLGTYHDLLKIIKDKDFLDNEENEDILEDIVLTLTLFEDREMIEERLKTYAHLFDDKVMKQLKRRRYTGWGRLSRKLINGIRDKQSGKTILDFLKSDGFANRNFMQLIHDDSLTFKEDIQKAQVSGQGDSLHEHIANLAGSPAIKKGILQTVKVVDELVKVMGRHKPENIVIEMARENQTTQKGQKNSRERMKRIEEGIKELGSQILKEHPVENTQLQNEKLYLYYLQNGRDMYVDQELDINRLSDYDVDHIVPQSFLKDDSIDNKVLTRSDKNRGKSDNVPSEEVVKKMKNYWRQLLNAKLITQRKFDNLTKAERGGLSELDKAGFIKRQLVETRQITKHVAQILDSRMNTKYDENDKLIREVKVITLKSKLVSDFRKDFQFYKVREINNYHHAHDAYLNAVVGTALIKKYPKLESEFVYGDYKVYDVRKMIAKSEQEIGKATAKYFFYSNIMNFFKTEITLANGEIRKRPLIETNGETGEIVWDKGRDFATVRKVLSMPQVNIVKKTEVQTGGFSKESILPKRNSDKLIARKKDWDPKKYGGFDSPTVAYSVLVVAKVEKGKSKKLKSVKELLGITIMERSSFEKNPIDFLEAKGYKEVKKDLIIKLPKYSLFELENGRKRMLASAGELQKGNELALPSKYVNFLYLASHYEKLKGSPEDNEQKQLFVEQHKHYLDEIIEQISEFSKRVILADANLDKVLSAYNKHRDKPIREQAENIIHLFTLTNLGAPAAFKYFDTTIDRKRYTSTKEVLDATLIHQSITGLYETRIDLSQLGGD

SEQ ID NO: 286 - protein, 1541 aa, synthetic construct
  REGION 1..1541: note = 115.1 Cas9 TadAins 1004 polypeptide sequence
MDKKYSIGLAIGTNSVGWAVITDEYKVPSKKFKVLGNTDRHSIKKNLIGALLFDSGETAEATRLKRTARRRYTRRKNRICYLQEIFSNEMAKVDDSFFHRLEESFLVEEDKKHERHPIFGNIVDEVAYHEKYPTIYHLRKKLVDSTDKADLRLIYLALAHMIKFRGHFLIEGDLNPDNSDVDKLFIQLVQTYNQLFEENPINASGVDAKAILSARLSKSRRLENLIAQLPGEKKNGLFGNLIALSLGLTPNFKSNFDLAEDAKLQLSKDTYDDDLDNLLAQIGDQYADLFLAAKNLSDAILLSDILRVNTEITKAPLSASMIKRYDEHHQDLTLLKALVRQQLPEKYKEIFFDQSKNGYAGYIDGGASQEEFYKFIKPILEKMDGTEELLVKLNREDLLRKQRTFDNGSIPHQIHLGELHAILRRQEDFYPFLKDNREKIEKILTFRIPYYVGPLARGNSRFAWMTRKSEETITPWNFEEVVDKGASAQSFIERMTNFDKNLPNEKVLPKHSLLYEYFTVYNELTKVKYVTEGMRKPAFLSGEQKKAIVDLLFKTNRKVTVKQLKEDYFKKIECFDSVEISGVEDRFNASLGTYHDLLKIIKDKDFLDNEENEDILEDIVLTLTLFEDREMIEERLKTYAHLFDDKVMKQLKRRRYTGWGRLSRKLINGIRDKQSGKTILDFLKSDGFANRNFMQLIHDDSLTFKEDIQKAQVSGQGDSLHEHIANLAGSPAIKKGILQTVKVVDELVKVMGRHKPENIVIEMARENQTTQKGQKNSRERMKRIEEGIKELGSQILKEHPVENTQLQNEKLYLYYLQNGRDMYVDQELDINRLSDYDVDHIVPQSFLKDDSIDNKVLTRSDKNRGKSDNVPSEEVVKKMKNYWRQLLNAKLITQRKFDNLTKAERGGLSELDKAGFIKRQLVETRQITKHVAQILDSRMNTKYDENDKLIREVKVITLKSKLVSDFRKDFQFYKVREINNYHHAHDAYLNAVVGTALIKKYPKGSSGSETPGTSESATPESSGSEVEFSHEYWMRHALTLAKRARDEREVPVGAVLVLNNRVIGEGWNRAIGLHDPTAHAEIMALRQGGLVMQNYRLIDATLYVTFEPCVMCAGAMIHSRIGRVVFGVRNAKTGAAGSLMDVLHYPGMNHRVEITEGILADECAALLCYFFRMPRQLESEFVYGDYKVYDVRKMIAKSEQEIGKATAKYFFYSNIMNFFKTEITLANGEIRKRPLIETNGETGEIVWDKGRDFATVRKVLSMPQVNIVKKTEVQTGGFSKESILPKRNSDKLIARKKDWDPKKYGGFDSPTVAYSVLVVAKVEKGKSKKLKSVKELLGITIMERSSFEKNPIDFLEAKGYKEVKKDLIIKLPKYSLFELENGRKRMLASAGELQKGNELALPSKYVNFLYLASHYEKLKGSPEDNEQKQLFVEQHKHYLDEIIEQISEFSKRVILADANLDKVLSAYNKHRDKPIREQAENIIHLFTLTNLGAPAAFKYFDTTIDRKRYTSTKEVLDATLIHQSITGLYETRIDLSQLGGD

SEQ ID NO: 287 - protein, 1541 aa, synthetic construct
  REGION 1..1541: note = 115.2 Cas9 TadAins 1005 polypeptide sequence
MDKKYSIGLAIGTNSVGWAVITDEYKVPSKKFKVLGNTDRHSIKKNLIGALLFDSGETAEATRLKRTARRRYTRRKNRICYLQEIFSNEMAKVDDSFFHRLEESFLVEEDKKHERHPIFGNIVDEVAYHEKYPTIYHLRKKLVDSTDKADLRLIYLALAHMIKFRGHFLIEGDLNPDNSDVDKLFIQLVQTYNQLFEENPINASGVDAKAILSARLSKSRRLENLIAQLPGEKKNGLFGNLIALSLGLTPNFKSNFDLAEDAKLQLSKDTYDDDLDNLLAQIGDQYADLFLAAKNLSDAILLSDILRVNTEITKAPLSASMIKRYDEHHQDLTLLKALVRQQLPEKYKEIFFDQSKNGYAGYIDGGASQEEFYKFIKPILEKMDGTEELLVKLNREDLLRKQRTFDNGSIPHQIHLGELHAILRRQEDFYPFLKDNREKIEKILTFRIPYYVGPLARGNSRFAWMTRKSEETITPWNFEEVVDKGASAQSFIERMTNFDKNLPNEKVLPKHSLLYEYFTVYNELTKVKYVTEGMRKPAFLSGEQKKAIVDLLFKTNRKVTVKQLKEDYFKKIECFDSVEISGVEDRFNASLGTYHDLLKIIKDKDFLDNEENEDILEDIVLTLTLFEDREMIEERLKTYAHLFDDKVMKQLKRRRYTGWGRLSRKLINGIRDKQSGKTILDFLKSDGFANRNFMQLIHDDSLTFKEDIQKAQVSGQGDSLHEHIANLAGSPAIKKGILQTVKVVDELVKVMGRHKPENIVIEMARENQTTQKGQKNSRERMKRIEEGIKELGSQILKEHPVENTQLQNEKLYLYYLQNGRDMYVDQELDINRLSDYDVDHIVPQSFLKDDSIDNKVLTRSDKNRGKSDNVPSEEVVKKMKNYWRQLLNAKLITQRKFDNLTKAERGGLSELDKAGFIKRQLVETRQITKHVAQILDSRMNTKYDENDKLIREVKVITLKSKLVSDFRKDFQFYKVREINNYHHAHDAYLNAVVGTALIKKYPKLGSSGSETPGTSESATPESSGSEVEFSHEYWMRHALTLAKRARDEREVPVGAVLVLNNRVIGEGWNRAIGLHDPTAHAEIMALRQGGLVMQNYRLIDATLYVTFEPCVMCAGAMIHSRIGRVVFGVRNAKTGAAGSLMDVLHYPGMNHRVEITEGILADECAALLCYFFRMPRQESEFVYGDYKVYDVRKMIAKSEQEIGKATAKYFFYSNIMNFFKTEITLANGEIRKRPLIETNGETGEIVWDKGRDFATVRKVLSMPQVNIVKKTEVQTGGFSKESILPKRNSDKLIARKKDWDPKKYGGFDSPTVAYSVLVVAKVEKGKSKKLKSVKELLGITIMERSSFEKNPIDFLEAKGYKEVKKDLIIKLPKYSLFELENGRKRMLASAGELQKGNELALPSKYVNFLYLASHYEKLKGSPEDNEQKQLFVEQHKHYLDEIIEQISEFSKRVILADANLDKVLSAYNKHRDKPIREQAENIIHLFTLTNLGAPAAFKYFDTTIDRKRYTSTKEVLDATLIHQSITGLYETRIDLSQLGGD

SEQ ID NO: 288 - protein, 1541 aa, synthetic construct
  REGION 1..1541: note = 115.3 Cas9 TadAins 1006 polypeptide sequence
MDKKYSIGLAIGTNSVGWAVITDEYKVPSKKFKVLGNTDRHSIKKNLIGALLFDSGETAEATRLKRTARRRYTRRKNRICYLQEIFSNEMAKVDDSFFHRLEESFLVEEDKKHERHPIFGNIVDEVAYHEKYPTIYHLRKKLVDSTDKADLRLIYLALAHMIKFRGHFLIEGDLNPDNSDVDKLFIQLVQTYNQLFEENPINASGVDAKAILSARLSKSRRLENLIAQLPGEKKNGLFGNLIALSLGLTPNFKSNFDLAEDAKLQLSKDTYDDDLDNLLAQIGDQYADLFLAAKNLSDAILLSDILRVNTEITKAPLSASMIKRYDEHHQDLTLLKALVRQQLPEKYKEIFFDQSKNGYAGYIDGGASQEEFYKFIKPILEKMDGTEELLVKLNREDLLRKQRTFDNGSIPHQIHLGELHAILRRQEDFYPFLKDNREKIEKILTFRIPYYVGPLARGNSRFAWMTRKSEETITPWNFEEVVDKGASAQSFIERMTNFDKNLPNEKVLPKHSLLYEYFTVYNELTKVKYVTEGMRKPAFLSGEQKKAIVDLLFKTNRKVTVKQLKEDYFKKIECFDSVEISGVEDRFNASLGTYHDLLKIIKDKDFLDNEENEDILEDIVLTLTLFEDREMIEERLKTYAHLFDDKVMKQLKRRRYTGWGRLSRKLINGIRDKQSGKTILDFLKSDGFANRNFMQLIHDDSLTFKEDIQKAQVSGQGDSLHEHIANLAGSPAIKKGILQTVKVVDELVKVMGRHKPENIVIEMARENQTTQKGQKNSRERMKRIEEGIKELGSQILKEHPVENTQLQNEKLYLYYLQNGRDMYVDQELDINRLSDYDVDHIVPQSFLKDDSIDNKVLTRSDKNRGKSDNVPSEEVVKKMKNYWRQLLNAKLITQRKFDNLTKAERGGLSELDKAGFIKRQLVETRQITKHVAQILDSRMNTKYDENDKLIREVKVITLKSKLVSDFRKDFQFYKVREINNYHHAHDAYLNAVVGTALIKKYPKLEGSSGSETPGTSESATPESSGSEVEFSHEYWMRHALTLAKRARDEREVPVGAVLVLNNRVIGEGWNRAIGLHDPTAHAEIMALRQGGLVMQNYRLIDATLYVTFEPCVMCAGAMIHSRIGRVVFGVRNAKTGAAGSLMDVLHYPGMNHRVEITEGILADECAALLCYFFRMPRQSEFVYGDYKVYDVRKMIAKSEQEIGKATAKYFFYSNIMNFFKTEITLANGEIRKRPLIETNGETGEIVWDKGRDFATVRKVLSMPQVNIVKKTEVQTGGFSKESILPKRNSDKLIARKKDWDPKKYGGFDSPTVAYSVLVVAKVEKGKSKKLKSVKELLGITIMERSSFEKNPIDFLEAKGYKEVKKDLIIKLPKYSLFELENGRKRMLASAGELQKGNELALPSKYVNFLYLASHYEKLKGSPEDNEQKQLFVEQHKHYLDEIIEQISEFSKRVILADANLDKVLSAYNKHRDKPIREQAENIIHLFTLTNLGAPAAFKYFDTTIDRKRYTSTKEVLDATLIHQSITGLYETRIDLSQLGGD

SEQ ID NO: 289 - protein, 1541 aa, synthetic construct
  REGION 1..1541: note = 115.4 Cas9 TadAins 1007 polypeptide sequence
MDKKYSIGLAIGTNSVGWAVITDEYKVPSKKFKVLGNTDRHSIKKNLIGALLFDSGETAEATRLKRTARRRYTRRKNRICYLQEIFSNEMAKVDDSFFHRLEESFLVEEDKKHERHPIFGNIVDEVAYHEKYPTIYHLRKKLVDSTDKADLRLIYLALAHMIKFRGHFLIEGDLNPDNSDVDKLFIQLVQTYNQLFEENPINASGVDAKAILSARLSKSRRLENLIAQLPGEKKNGLFGNLIALSLGLTPNFKSNFDLAEDAKLQLSKDTYDDDLDNLLAQIGDQYADLFLAAKNLSDAILLSDILRVNTEITKAPLSASMIKRYDEHHQDLTLLKALVRQQLPEKYKEIFFDQSKNGYAGYIDGGASQEEFYKFIKPILEKMDGTEELLVKLNREDLLRKQRTFDNGSIPHQIHLGELHAILRRQEDFYPFLKDNREKIEKILTFRIPYYVGPLARGNSRFAWMTRKSEETITPWNFEEVVDKGASAQSFIERMTNFDKNLPNEKVLPKHSLLYEYFTVYNELTKVKYVTEGMRKPAFLSGEQKKAIVDLLFKTNRKVTVKQLKEDYFKKIECFDSVEISGVEDRFNASLGTYHDLLKIIKDKDFLDNEENEDILEDIVLTLTLFEDREMIEERLKTYAHLFDDKVMKQLKRRRYTGWGRLSRKLINGIRDKQSGKTILDFLKSDGFANRNFMQLIHDDSLTFKEDIQKAQVSGQGDSLHEHIANLAGSPAIKKGILQTVKVVDELVKVMGRHKPENIVIEMARENQTTQKGQKNSRERMKRIEEGIKELGSQILKEHPVENTQLQNEKLYLYYLQNGRDMYVDQELDINRLSDYDVDHIVPQSFLKDDSIDNKVLTRSDKNRGKSDNVPSEEVVKKMKNYWRQLLNAKLITQRKFDNLTKAERGGLSELDKAGFIKRQLVETRQITKHVAQILDSRMNTKYDENDKLIREVKVITLKSKLVSDFRKDFQFYKVREINNYHHAHDAYLNAVVGTALIKKYPKLESGSSGSETPGTSESATPESSGSEVEFSHEYWMRHALTLAKRARDEREVPVGAVLVLNNRVIGEGWNRAIGLHDPTAHAEIMALRQGGLVMQNYRLIDATLYVTFEPCVMCAGAMIHSRIGRVVFGVRNAKTGAAGSLMDVLHYPGMNHRVEITEGILADECAALLCYFFRMPRQEFVYGDYKVYDVRKMIAKSEQEIGKATAKYFFYSNIMNFFKTEITLANGEIRKRPLIETNGETGEIVWDKGRDFATVRKVLSMPQVNIVKKTEVQTGGFSKESILPKRNSDKLIARKKDWDPKKYGGFDSPTVAYSVLVVAKVEKGKSKKLKSVKELLGITIMERSSFEKNPIDFLEAKGYKEVKKDLIIKLPKYSLFELENGRKRMLASAGELQKGNELALPSKYVNFLYLASHYEKLKGSPEDNEQKQLFVEQHKHYLDEIIEQISEFSKRVILADANLDKVLSAYNKHRDKPIREQAENIIHLFTLTNLGAPAAFKYFDTTIDRKRYTSTKEVLDATLIHQSITGLYETRIDLSQLGGD

SEQ ID NO: 290 - protein, 1541 aa, synthetic construct
  REGION 1..1541: note = 116.1 Cas9 TadAins C-term truncate 792 polypeptide sequence
MDKKYSIGLAIGTNSVGWAVITDEYKVPSKKFKVLGNTDRHSIKKNLIGALLFDSGETAEATRLKRTARRRYTRRKNRICYLQEIFSNEMAKVDDSFFHRLEESFLVEEDKKHERHPIFGNIVDEVAYHEKYPTIYHLRKKLVDSTDKADLRLIYLALAHMIKFRGHFLIEGDLNPDNSDVDKLFIQLVQTYNQLFEENPINASGVDAKAILSARLSKSRRLENLIAQLPGEKKNGLFGNLIALSLGLTPNFKSNFDLAEDAKLQLSKDTYDDDLDNLLAQIGDQYADLFLAAKNLSDAILLSDILRVNTEITKAPLSASMIKRYDEHHQDLTLLKALVRQQLPEKYKEIFFDQSKNGYAGYIDGGASQEEFYKFIKPILEKMDGTEELLVKLNREDLLRKQRTFDNGSIPHQIHLGELHAILRRQEDFYPFLKDNREKIEKILTFRIPYYVGPLARGNSRFAWMTRKSEETITPWNFEEVVDKGASAQSFIERMTNFDKNLPNEKVLPKHSLLYEYFTVYNELTKVKYVTEGMRKPAFLSGEQKKAIVDLLFKTNRKVTVKQLKEDYFKKIECFDSVEISGVEDRFNASLGTYHDLLKIIKDKDFLDNEENEDILEDIVLTLTLFEDREMIEERLKTYAHLFDDKVMKQLKRRRYTGWGRLSRKLINGIRDKQSGKTILDFLKSDGFANRNFMQLIHDDSLTFKEDIQKAQVSGQGDSLHEHIANLAGSPAIKKGILQTVKVVDELVKVMGRHKPENIVIEMARENQTTQKGQKNSRERMKRIEEGIKELGGSSGSETPGTSESATPESSGSEVEFSHEYWMRHALTLAKRARDEREVPVGAVLVLNNRVIGEGWNRAIGLHDPTAHAEIMALRQGGLVMQNYRLIDATLYVTFEPCVMCAGAMIHSRIGRVVFGVRNAKTGAAGSLMDVLHYPGMNHRVEITEGILADECAALLCYFFRMPRQSQILKEHPVENTQLQNEKLYLYYLQNGRDMYVDQELDINRLSDYDVDHIVPQSFLKDDSIDNKVLTRSDKNRGKSDNVPSEEVVKKMKNYWRQLLNAKLITQRKFDNLTKAERGGLSELDKAGFIKRQLVETRQITKHVAQILDSRMNTKYDENDKLIREVKVITLKSKLVSDFRKDFQFYKVREINNYHHAHDAYLNAVVGTALIKKYPKLESEFVYGDYKVYDVRKMIAKSEQEIGKATAKYFFYSNIMNFFKTEITLANGEIRKRPLIETNGETGEIVWDKGRDFATVRKVLSMPQVNIVKKTEVQTGGFSKESILPKRNSDKLIARKKDWDPKKYGGFDSPTVAYSVLVVAKVEKGKSKKLKSVKELLGITIMERSSFEKNPIDFLEAKGYKEVKKDLIIKLPKYSLFELENGRKRMLASAGELQKGNELALPSKYVNFLYLASHYEKLKGSPEDNEQKQLFVEQHKHYLDEIIEQISEFSKRVILADANLDKVLSAYNKHRDKPIREQAENIIHLFTLTNLGAPAAFKYFDTTIDRKRYTSTKEVLDATLIHQSITGLYETRIDLSQLGGD

SEQ ID NO: 291 - protein, 1541 aa, synthetic construct
  REGION 1..1541: note = 116.2 Cas9 TadAins C-term truncate 791 polypeptide sequence
MDKKYSIGLAIGTNSVGWAVITDEYKVPSKKFKVLGNTDRHSIKKNLIGALLFDSGETAEATRLKRTARRRYTRRKNRICYLQEIFSNEMAKVDDSFFHRLEESFLVEEDKKHERHPIFGNIVDEVAYHEKYPTIYHLRKKLVDSTDKADLRLIYLALAHMIKFRGHFLIEGDLNPDNSDVDKLFIQLVQTYNQLFEENPINASGVDAKAILSARLSKSRRLENLIAQLPGEKKNGLFGNLIALSLGLTPNFKSNFDLAEDAKLQLSKDTYDDDLDNLLAQIGDQYADLFLAAKNLSDAILLSDILRVNTEITKAPLSASMIKRYDEHHQDLTLLKALVRQQLPEKYKEIFFDQSKNGYAGYIDGGASQEEFYKFIKPILEKMDGTEELLVKLNREDLLRKQRTFDNGSIPHQIHLGELHAILRRQEDFYPFLKDNREKIEKILTFRIPYYVGPLARGNSRFAWMTRKSEETITPWNFEEVVDKGASAQSFIERMTNFDKNLPNEKVLPKHSLLYEYFTVYNELTKVKYVTEGMRKPAFLSGEQKKAIVDLLFKTNRKVTVKQLKEDYFKKIECFDSVEISGVEDRFNASLGTYHDLLKIIKDKDFLDNEENEDILEDIVLTLTLFEDREMIEERLKTYAHLFDDKVMKQLKRRRYTGWGRLSRKLINGIRDKQSGKTILDFLKSDGFANRNFMQLIHDDSLTFKEDIQKAQVSGQGDSLHEHIANLAGSPAIKKGILQTVKVVDELVKVMGRHKPENIVIEMARENQTTQKGQKNSRERMKRIEEGIKELGSSGSETPGTSESATPESSGSEVEFSHEYWMRHALTLAKRARDEREVPVGAVLVLNNRVIGEGWNRAIGLHDPTAHAEIMALRQGGLVMQNYRLIDATLYVTFEPCVMCAGAMIHSRIGRVVFGVRNAKTGAAGSLMDVLHYPGMNHRVEITEGILADECAALLCYFFRMPRQGSQILKEHPVENTQLQNEKLYLYYLQNGRDMYVDQELDINRLSDYDVDHIVPQSFLKDDSIDNKVLTRSDKNRGKSDNVPSEEVVKKMKNYWRQLLNAKLITQRKFDNLTKAERGGLSELDKAGFIKRQLVETRQITKHVAQILDSRMNTKYDENDKLIREVKVITLKSKLVSDFRKDFQFYKVREINNYHHAHDAYLNAVVGTALIKKYPKLESEFVYGDYKVYDVRKMIAKSEQEIGKATAKYFFYSNIMNFFKTEITLANGEIRKRPLIETNGETGEIVWDKGRDFATVRKVLSMPQVNIVKKTEVQTGGFSKESILPKRNSDKLIARKKDWDPKKYGGFDSPTVAYSVLVVAKVEKGKSKKLKSVKELLGITIMERSSFEKNPIDFLEAKGYKEVKKDLIIKLPKYSLFELENGRKRMLASAGELQKGNELALPSKYVNFLYLASHYEKLKGSPEDNEQKQLFVEQHKHYLDEIIEQISEFSKRVILADANLDKVLSAYNKHRDKPIREQAENIIHLFTLTNLGAPAAFKYFDTTIDRKRYTSTKEVLDATLIHQSITGLYETRIDLSQLGGD

SEQ ID NO: 292 - protein, 1541 aa, synthetic construct
  REGION 1..1541: note = 116.3 Cas9 TadAins C-term truncate 790 polypeptide sequence
MDKKYSIGLAIGTNSVGWAVITDEYKVPSKKFKVLGNTDRHSIKKNLIGALLFDSGETAEATRLKRTARRRYTRRKNRICYLQEIFSNEMAKVDDSFFHRLEESFLVEEDKKHERHPIFGNIVDEVAYHEKYPTIYHLRKKLVDSTDKADLRLIYLALAHMIKFRGHFLIEGDLNPDNSDVDKLFIQLVQTYNQLFEENPINASGVDAKAILSARLSKSRRLENLIAQLPGEKKNGLFGNLIALSLGLTPNFKSNFDLAEDAKLQLSKDTYDDDLDNLLAQIGDQYADLFLAAKNLSDAILLSDILRVNTEITKAPLSASMIKRYDEHHQDLTLLKALVRQQLPEKYKEIFFDQSKNGYAGYIDGGASQEEFYKFIKPILEKMDGTEELLVKLNREDLLRKQRTFDNGSIPHQIHLGELHAILRRQEDFYPFLKDNREKIEKILTFRIPYYVGPLARGNSRFAWMTRKSEETITPWNFEEVVDKGASAQSFIERMTNFDKNLPNEKVLPKHSLLYEYFTVYNELTKVKYVTEGMRKPAFLSGEQKKAIVDLLFKTNRKVTVKQLKEDYFKKIECFDSVEISGVEDRFNASLGTYHDLLKIIKDKDFLDNEENEDILEDIVLTLTLFEDREMIEERLKTYAHLFDDKVMKQLKRRRYTGWGRLSRKLINGIRDKQSGKTILDFLKSDGFANRNFMQLIHDDSLTFKEDIQKAQVSGQGDSLHEHIANLAGSPAIKKGILQTVKVVDELVKVMGRHKPENIVIEMARENQTTQKGQKNSRERMKRIEEGIKEGSSGSETPGTSESATPESSGSEVEFSHEYWMRHALTLAKRARDEREVPVGAVLVLNNRVIGEGWNRAIGLHDPTAHAEIMALRQGGLVMQNYRLIDATLYVTFEPCVMCAGAMIHSRIGRVVFGVRNAKTGAAGSLMDVLHYPGMNHRVEITEGILADECAALLCYFFRMPRQLGSQILKEHPVENTQLQNEKLYLYYLQNGRDMYVDQELDINRLSDYDVDHIVPQSFLKDDSIDNKVLTRSDKNRGKSDNVPSEEVVKKMKNYWRQLLNAKLITQRKFDNLTKAERGGLSELDKAGFIKRQLVETRQITKHVAQILDSRMNTKYDENDKLIREVKVITLKSKLVSDFRKDFQFYKVREINNYHHAHDAYLNAVVGTALIKKYPKLESEFVYGDYKVYDVRKMIAKSEQEIGKATAKYFFYSNIMNFFKTEITLANGEIRKRPLIETNGETGEIVWDKGRDFATVRKVLSMPQVNIVKKTEVQTGGFSKESILPKRNSDKLIARKKDWDPKKYGGFDSPTVAYSVLVVAKVEKGKSKKLKSVKELLGITIMERSSFEKNPIDFLEAKGYKEVKKDLIIKLPKYSLFELENGRKRMLASAGELQKGNELALPSKYVNFLYLASHYEKLKGSPEDNEQKQLFVEQHKHYLDEIIEQISEFSKRVILADANLDKVLSAYNKHRDKPIREQAENIIHLFTLTNLGAPAAFKYFDTTIDRKRYTSTKEVLDATLIHQSITGLYETRIDLSQLGGD

SEQ ID NO: 293 - protein, 1484 aa, synthetic construct
  REGION 1..1484: note = 117 Cas9 delta 1017-1069 polypeptide sequence
MDKKYSIGLAIGTNSVGWAVITDEYKVPSKKFKVLGNTDRHSIKKNLIGALLFDSGETAEATRLKRTARRRYTRRKNRICYLQEIFSNEMAKVDDSFFHRLEESFLVEEDKKHERHPIFGNIVDEVAYHEKYPTIYHLRKKLVDSTDKADLRLIYLALAHMIKFRGHFLIEGDLNPDNSDVDKLFIQLVQTYNQLFEENPINASGVDAKAILSARLSKSRRLENLIAQLPGEKKNGLFGNLIALSLGLTPNFKSNFDLAEDAKLQLSKDTYDDDLDNLLAQIGDQYADLFLAAKNLSDAILLSDILRVNTEITKAPLSASMIKRYDEHHQDLTLLKALVRQQLPEKYKEIFFDQSKNGYAGYIDGGASQEEFYKFIKPILEKMDGTEELLVKLNREDLLRKQRTFDNGSIPHQIHLGELHAILRRQEDFYPFLKDNREKIEKILTFRIPYYVGPLARGNSRFAWMTRKSEETITPWNFEEVVDKGASAQSFIERMTNFDKNLPNEKVLPKHSLLYEYFTVYNELTKVKYVTEGMRKPAFLSGEQKKAIVDLLFKTNRKVTVKQLKEDYFKKIECFDSVEISGVEDRFNASLGTYHDLLKIIKDKDFLDNEENEDILEDIVLTLTLFEDREMIEERLKTYAHLFDDKVMKQLKRRRYTGWGRLSRKLINGIRDKQSGKTILDFLKSDGFANRNFMQLIHDDSLTFKEDIQKAQVSGQGDSLHEHIANLAGSPAIKKGILQTVKVVDELVKVMGRHKPENIVIEMARENQTTQKGQKNSRERMKRIEEGIKELGSQILKEHPVENTQLQNEKLYLYYLQNGRDMYVDQELDINRLSDYDVDHIVPQSFLKDDSIDNKVLTRSDKNRGKSDNVPSEEVVKKMKNYWRQLLNAKLITQRKFDNLTKAERGGLSELDKAGFIKRQLVETRQITKHVAQILDSRMNTKYDENDKLIREVKVITLKSKLVSDFRKDFQFYKVREINNYHHAHDAYLNAVVGTALIKKYPKLESEFVYGDYKVYSSGSEVEFSHEYWMRHALTLAKRARDEREVPVGAVLVLNNRVIGEGWNRAIGLHDPTAHAEIMALRQGGLVMQNYRLIDATLYVTFEPCVMCAGAMIHSRIGRVVFGVRNAKTGAAGSLMDVLHYPGMNHRVEITEGILADECAALLCYFFRMPRQVFNAQKKAQSSTDGEIVWDKGRDFATVRKVLSMPQVNIVKKTEVQTGGFSKESILPKRNSDKLIARKKDWDPKKYGGFDSPTVAYSVLVVAKVEKGKSKKLKSVKELLGITIMERSSFEKNPIDFLEAKGYKEVKKDLIIKLPKYSLFELENGRKRMLASAGELQKGNELALPSKYVNFLYLASHYEKLKGSPEDNEQKQLFVEQHKHYLDEIIEQISEFSKRVILADANLDKVLSAYNKHRDKPIREQAENIIHLFTLTNLGAPAAFKYFDTTIDRKRYTSTKEVLDATLIHQSITGLYETRIDLSQLGGD

SEQ ID NO: 294 - protein, 1554 aa, synthetic construct
  REGION 1..1554: note = 118 Cas9 TadA-CP116ins 1067 polypeptide sequence
MDKKYSIGLAIGTNSVGWAVITDEYKVPSKKFKVLGNTDRHSIKKNLIGALLFDSGETAEATRLKRTARRRYTRRKNRICYLQEIFSNEMAKVDDSFFHRLEESFLVEEDKKHERHPIFGNIVDEVAYHEKYPTIYHLRKKLVDSTDKADLRLIYLALAHMIKFRGHFLIEGDLNPDNSDVDKLFIQLVQTYNQLFEENPINASGVDAKAILSARLSKSRRLENLIAQLPGEKKNGLFGNLIALSLGLTPNFKSNFDLAEDAKLQLSKDTYDDDLDNLLAQIGDQYADLFLAAKNLSDAILLSDILRVNTEITKAPLSASMIKRYDEHHQDLTLLKALVRQQLPEKYKEIFFDQSKNGYAGYIDGGASQEEFYKFIKPILEKMDGTEELLVKLNREDLLRKQRTFDNGSIPHQIHLGELHAILRRQEDFYPFLKDNREKIEKILTFRIPYYVGPLARGNSRFAWMTRKSEETITPWNFEEVVDKGASAQSFIERMTNFDKNLPNEKVLPKHSLLYEYFTVYNELTKVKYVTEGMRKPAFLSGEQKKAIVDLLFKTNRKVTVKQLKEDYFKKIECFDSVEISGVEDRFNASLGTYHDLLKIIKDKDFLDNEENEDILEDIVLTLTLFEDREMIEERLKTYAHLFDDKVMKQLKRRRYTGWGRLSRKLINGIRDKQSGKTILDFLKSDGFANRNFMQLIHDDSLTFKEDIQKAQVSGQGDSLHEHIANLAGSPAIKKGILQTVKVVDELVKVMGRHKPENIVIEMARENQTTQKGQKNSRERMKRIEEGIKELGSQILKEHPVENTQLQNEKLYLYYLQNGRDMYVDQELDINRLSDYDVDHIVPQSFLKDDSIDNKVLTRSDKNRGKSDNVPSEEVVKKMKNYWRQLLNAKLITQRKFDNLTKAERGGLSELDKAGFIKRQLVETRQITKHVAQILDSRMNTKYDENDKLIREVKVITLKSKLVSDFRKDFQFYKVREINNYHHAHDAYLNAVVGTALIKKYPKLESEFVYGDYKVYDVRKMIAKSEQEIGKATAKYFFYSNIMNFFKTEITLANGEIRKRPLIETNMNHRVEITEGILADECAALLCYFFRMPRQVFNAQKKAQSSTDGSSGSETPGTSESATPESSGSEVEFSHEYWMRHALTLAKRARDEREVPVGAVLVLNNRVIGEGWNRAIGLHDPTAHAEIMALRQGGLVMQNYRLIDATLYVTFEPCVMCAGAMIHSRIGRVVFGVRNAKTGAAGSLMDVLHYPGGETGEIVWDKGRDFATVRKVLSMPQVNIVKKTEVQTGGFSKESILPKRNSDKLIARKKDWDPKKYGGFDSPTVAYSVLVVAKVEKGKSKKLKSVKELLGITIMERSSFEKNPIDFLEAKGYKEVKKDLIIKLPKYSLFELENGRKRMLASAGELQKGNELALPSKYVNFLYLASHYEKLKGSPEDNEQKQLFVEQHKHYLDEIIEQISEFSKRVILADANLDKVLSAYNKHRDKPIREQAENIIHLFTLTNLGAPAAFKYFDTTIDRKRYTSTKEVLDATLIHQSITGLYETRIDLSQLGGD

SEQ ID NO: 295 - protein, 1554 aa, synthetic construct
  REGION 1..1554: note = 119 Cas9 TadAins 701 polypeptide sequence
MDKKYSIGLAIGTNSVGWAVITDEYKVPSKKFKVLGNTDRHSIKKNLIGALLFDSGETAEATRLKRTARRRYTRRKNRICYLQEIFSNEMAKVDDSFFHRLEESFLVEEDKKHERHPIFGNIVDEVAYHEKYPTIYHLRKKLVDSTDKADLRLIYLALAHMIKFRGHFLIEGDLNPDNSDVDKLFIQLVQTYNQLFEENPINASGVDAKAILSARLSKSRRLENLIAQLPGEKKNGLFGNLIALSLGLTPNFKSNFDLAEDAKLQLSKDTYDDDLDNLLAQIGDQYADLFLAAKNLSDAILLSDILRVNTEITKAPLSASMIKRYDEHHQDLTLLKALVRQQLPEKYKEIFFDQSKNGYAGYIDGGASQEEFYKFIKPILEKMDGTEELLVKLNREDLLRKQRTFDNGSIPHQIHLGELHAILRRQEDFYPFLKDNREKIEKILTFRIPYYVGPLARGNSRFAWMTRKSEETITPWNFEEVVDKGASAQSFIERMTNFDKNLPNEKVLPKHSLLYEYFTVYNELTKVKYVTEGMRKPAFLSGEQKKAIVDLLFKTNRKVTVKQLKEDYFKKIECFDSVEISGVEDRFNASLGTYHDLLKIIKDKDFLDNEENEDILEDIVLTLTLFEDREMIEERLKTYAHLFDDKVMKQLKRRRYTGWGRLSRKLINGIRDKQSGKTILDFLKSDGFANRNFMQLIHDDSGSSGSETPGTSESATPESSGSEVEFSHEYWMRHALTLAKRARDEREVPVGAVLVLNNRVIGEGWNRAIGLHDPTAHAEIMALRQGGLVMQNYRLIDATLYVTFEPCVMCAGAMIHSRIGRVVFGVRNAKTGAAGSLMDVLHYPGMNHRVEITEGILADECAALLCYFFRMPRQVFNAQKKAQSSTDLTFKEDIQKAQVSGQGDSLHEHIANLAGSPAIKKGILQTVKVVDELVKVMGRHKPENIVIEMARENQTTQKGQKNSRERMKRIEEGIKELGSQILKEHPVENTQLQNEKLYLYYLQNGRDMYVDQELDINRLSDYDVDHIVPQSFLKDDSIDNKVLTRSDKNRGKSDNVPSEEVVKKMKNYWRQLLNAKLITQRKFDNLTKAERGGLSELDKAGFIKRQLVETRQITKHVAQILDSRMNTKYDENDKLIREVKVITLKSKLVSDFRKDFQFYKVREINNYHHAHDAYLNAVVGTALIKKYPKLESEFVYGDYKVYDVRKMIAKSEQEIGKATAKYFFYSNIMNFFKTEITLANGEIRKRPLIETNGETGEIVWDKGRDFATVRKVLSMPQVNIVKKTEVQTGGFSKESILPKRNSDKLIARKKDWDPKKYGGFDSPTVAYSVLVVAKVEKGKSKKLKSVKELLGITIMERSSFEKNPIDFLEAKGYKEVKKDLIIKLPKYSLFELENGRKRMLASAGELQKGNELALPSKYVNFLYLASHYEKLKGSPEDNEQKQLFVEQHKHYLDEIIEQISEFSKRVILADANLDKVLSAYNKHRDKPIREQAENIIHLFTLTNLGAPAAFKYFDTTIDRKRYTSTKEVLDATLIHQSITGLYETRIDLSQLGGD

SEQ ID NO: 296 - protein, 1554 aa, synthetic construct
  REGION 1..1554: note = 120 Cas9 TadACP136ins 1248 polypeptide sequence
MDKKYSIGLAIGTNSVGWAVITDEYKVPSKKFKVLGNTDRHSIKKNLIGALLFDSGETAEATRLKRTARRRYTRRKNRICYLQEIFSNEMAKVDDSFFHRLEESFLVEEDKKHERHPIFGNIVDEVAYHEKYPTIYHLRKKLVDSTDKADLRLIYLALAHMIKFRGHFLIEGDLNPDNSDVDKLFIQLVQTYNQLFEENPINASGVDAKAILSARLSKSRRLENLIAQLPGEKKNGLFGNLIALSLGLTPNFKSNFDLAEDAKLQLSKDTYDDDLDNLLAQIGDQYADLFLAAKNLSDAILLSDILRVNTEITKAPLSASMIKRYDEHHQDLTLLKALVRQQLPEKYKEIFFDQSKNGYAGYIDGGASQEEFYKFIKPILEKMDGTEELLVKLNREDLLRKQRTFDNGSIPHQIHLGELHAILRRQEDFYPFLKDNREKIEKILTFRIPYYVGPLARGNSRFAWMTRKSEETITPWNFEEVVDKGASAQSFIERMTNFDKNLPNEKVLPKHSLLYEYFTVYNELTKVKYVTEGMRKPAFLSGEQKKAIVDLLFKTNRKVTVKQLKEDYFKKIECFDSVEISGVEDRFNASLGTYHDLLKIIKDKDFLDNEENEDILEDIVLTLTLFEDREMIEERLKTYAHLFDDKVMKQLKRRRYTGWGRLSRKLINGIRDKQSGKTILDFLKSDGFANRNFMQLIHDDSLTFKEDIQKAQVSGQGDSLHEHIANLAGSPAIKKGILQTVKVVDELVKVMGRHKPENIVIEMARENQTTQKGQKNSRERMKRIEEGIKELGSQILKEHPVENTQLQNEKLYLYYLQNGRDMYVDQELDINRLSDYDVDHIVPQSFLKDDSIDNKVLTRSDKNRGKSDNVPSEEVVKKMKNYWRQLLNAKLITQRKFDNLTKAERGGLSELDKAGFIKRQLVETRQITKHVAQILDSRMNTKYDENDKLIREVKVITLKSKLVSDFRKDFQFYKVREINNYHHAHDAYLNAVVGTALIKKYPKLESEFVYGDYKVYDVRKMIAKSEQEIGKATAKYFFYSNIMNFFKTEITLANGEIRKRPLIETNGETGEIVWDKGRDFATVRKVLSMPQVNIVKKTEVQTGGFSKESILPKRNSDKLIARKKDWDPKKYGGFDSPTVAYSVLVVAKVEKGKSKKLKSVKELLGITIMERSSFEKNPIDFLEAKGYKEVKKDLIIKLPKYSLFELENGRKRMLASAGELQKGNELALPSKYVNFLYLASHYEKLKGSMNHRVEITEGILADECAALLCYFFRMPRQVFNAQKKAQSSTDGSSGSETPGTSESATPESSGSEVEFSHEYWMRHALTLAKRARDEREVPVGAVLVLNNRVIGEGWNRAIGLHDPTAHAEIMALRQGGLVMQNYRLIDATLYVTFEPCVMCAGAMIHSRIGRVVFGVRNAKTGAAGSLMDVLHYPGPEDNEQKQLFVEQHKHYLDEIIEQISEFSKRVILADANLDKVLSAYNKHRDKPIREQAENIIHLFTLTNLGAPAAFKYFDTTIDRKRYTSTKEVLDATLIHQSITGLYETRIDLSQLGGD

SEQ ID NO: 297 - protein, 1554 aa, synthetic construct
  REGION 1..1554: note = 121 Cas9 TadACP136ins 1052 polypeptide sequence
MDKKYSIGLAIGTNSVGWAVITDEYKVPSKKFKVLGNTDRHSIKKNLIGALLFDSGETAEATRLKRTARRRYTRRKNRICYLQEIFSNEMAKVDDSFFHRLEESFLVEEDKKHERHPIFGNIVDEVAYHEKYPTIYHLRKKLVDSTDKADLRLIYLALAHMIKFRGHFLIEGDLNPDNSDVDKLFIQLVQTYNQLFEENPINASGVDAKAILSARLSKSRRLENLIAQLPGEKKNGLFGNLIALSLGLTPNFKSNFDLAEDAKLQLSKDTYDDDLDNLLAQIGDQYADLFLAAKNLSDAILLSDILRVNTEITKAPLSASMIKRYDEHHQDLTLLKALVRQQLPEKYKEIFFDQSKNGYAGYIDGGASQEEFYKFIKPILEKMDGTEELLVKLNREDLLRKQRTFDNGSIPHQIHLGELHAILRRQEDFYPFLKDNREKIEKILTFRIPYYVGPLARGNSRFAWMTRKSEETITPWNFEEVVDKGASAQSFIERMTNFDKNLPNEKVLPKHSLLYEYFTVYNELTKVKYVTEGMRKPAFLSGEQKKAIVDLLFKTNRKVTVKQLKEDYFKKIECFDSVEISGVEDRFNASLGTYHDLLKIIKDKDFLDNEENEDILEDIVLTLTLFEDREMIEERLKTYAHLFDDKVMKQLKRRRYTGWGRLSRKLINGIRDKQSGKTILDFLKSDGFANRNFMQLIHDDSLTFKEDIQKAQVSGQGDSLHEHIANLAGSPAIKKGILQTVKVVDELVKVMGRHKPENIVIEMARENQTTQKGQKNSRERMKRIEEGIKELGSQILKEHPVENTQLQNEKLYLYYLQNGRDMYVDQELDINRLSDYDVDHIVPQSFLKDDSIDNKVLTRSDKNRGKSDNVPSEEVVKKMKNYWRQLLNAKLITQRKFDNLTKAERGGLSELDKAGFIKRQLVETRQITKHVAQILDSRMNTKYDENDKLIREVKVITLKSKLVSDFRKDFQFYKVREINNYHHAHDAYLNAVVGTALIKKYPKLESEFVYGDYKVYDVRKMIAKSEQEIGKATAKYFFYSNIMNFFKTEITLAMNHRVEITEGILADECAALLCYFFRMPRQVFNAQKKAQSSTDGSSGSETPGTSESATPESSGSEVEFSHEYWMRHALTLAKRARDEREVPVGAVLVLNNRVIGEGWNRAIGLHDPTAHAEIMALRQGGLVMQNYRLIDATLYVTFEPCVMCAGAMIHSRIGRVVFGVRNAKTGAAGSLMDVLHYPGNGEIRKRPLIETNGETGEIVWDKGRDFATVRKVLSMPQVNIVKKTEVQTGGFSKESILPKRNSDKLIARKKDWDPKKYGGFDSPTVAYSVLVVAKVEKGKSKKLKSVKELLGITIMERSSFEKNPIDFLEAKGYKEVKKDLIIKLPKYSLFELENGRKRMLASAGELQKGNELALPSKYVNFLYLASHYEKLKGSPEDNEQKQLFVEQHKHYLDEIIEQISEFSKRVILADANLDKVLSAYNKHRDKPIREQAENIIHLFTLTNLGAPAAFKYFDTTIDRKRYTSTKEVLDATLIHQSITGLYETRIDLSQLGGD

SEQ ID NO: 298 - protein, 1554 aa, synthetic construct
  REGION 1..1554: note = 122 Cas9 TadACP136ins 1041 polypeptide sequence
MDKKYSIGLAIGTNSVGWAVITDEYKVPSKKFKVLGNTDRHSIKKNLIGALLFDSGETAEATRLKRTARRRYTRRKNRICYLQEIFSNEMAKVDDSFFHRLEESFLVEEDKKHERHPIFGNIVDEVAYHEKYPTIYHLRKKLVDSTDKADLRLIYLALAHMIKFRGHFLIEGDLNPDNSDVDKLFIQLVQTYNQLFEENPINASGVDAKAILSARLSKSRRLENLIAQLPGEKKNGLFGNLIALSLGLTPNFKSNFDLAEDAKLQLSKDTYDDDLDNLLAQIGDQYADLFLAAKNLSDAILLSDILRVNTEITKAPLSASMIKRYDEHHQDLTLLKALVRQQLPEKYKEIFFDQSKNGYAGYIDGGASQEEFYKFIKPILEKMDGTEELLVKLNREDLLRKQRTFDNGSIPHQIHLGELHAILRRQEDFYPFLKDNREKIEKILTFRIPYYVGPLARGNSRFAWMTRKSEETITPWNFEEVVDKGASAQSFIERMTNFDKNLPNEKVLPKHSLLYEYFTVYNELTKVKYVTEGMRKPAFLSGEQKKAIVDLLFKTNRKVTVKQLKEDYFKKIECFDSVEISGVEDRFNASLGTYHDLLKIIKDKDFLDNEENEDILEDIVLTLTLFEDREMIEERLKTYAHLFDDKVMKQLKRRRYTGWGRLSRKLINGIRDKQSGKTILDFLKSDGFANRNFMQLIHDDSLTFKEDIQKAQVSGQGDSLHEHIANLAGSPAIKKGILQTVKVVDELVKVMGRHKPENIVIEMARENQTTQKGQKNSRERMKRIEEGIKELGSQILKEHPVENTQLQNEKLYLYYLQNGRDMYVDQELDINRLSDYDVDHIVPQSFLKDDSIDNKVLTRSDKNRGKSDNVPSEEVVKKMKNYWRQLLNAKLITQRKFDNLTKAERGGLSELDKAGFIKRQLVETRQITKHVAQILDSRMNTKYDENDKLIREVKVITLKSKLVSDFRKDFQFYKVREINNYHHAHDAYLNAVVGTALIKKYPKLESEFVYGDYKVYDVRKMIAKSEQEIGKATAKYFFYSMNHRVEITEGILADECAALLCYFFRMPRQVFNAQKKAQSSTDGSSGSETPGTSESATPESSGSEVEFSHEYWMRHALTLAKRARDEREVPVGAVLVLNNRVIGEGWNRAIGLHDPTAHAEIMALRQGGLVMQNYRLIDATLYVTFEPCVMCAGAMIHSRIGRVVFGVRNAKTGAAGSLMDVLHYPGNIMNFFKTEITLANGEIRKRPLIETNGETGEIVWDKGRDFATVRKVLSMPQVNIVKKTEVQTGGFSKESILPKRNSDKLIARKKDWDPKKYGGFDSPTVAYSVLVVAKVEKGKSKKLKSVKELLGITIMERSSFEKNPIDFLEAKGYKEVKKDLIIKLPKYSLFELENGRKRMLASAGELQKGNELALPSKYVNFLYLASHYEKLKGSPEDNEQKQLFVEQHKHYLDEIIEQISEFSKRVILADANLDKVLSAYNKHRDKPIREQAENIIHLFTLTNLGAPAAFKYFDTTIDRKRYTSTKEVLDATLIHQSITGLYETRIDLSQLGGD

SEQ ID NO: 299 - protein, 1554 aa, synthetic construct
  REGION 1..1554: note = 123 Cas9 TadACP139ins 1299 polypeptide sequence
MDKKYSIGLAIGTNSVGWAVITDEYKVPSKKFKVLGNTDRHSIKKNLIGALLFDSGETAEATRLKRTARRRYTRRKNRICYLQEIFSNEMAKVDDSFFHRLEESFLVEEDKKHERHPIFGNIVDEVAYHEKYPTIYHLRKKLVDSTDKADLRLIYLALAHMIKFRGHFLIEGDLNPDNSDVDKLFIQLVQTYNQLFEENPINASGVDAKAILSARLSKSRRLENLIAQLPGEKKNGLFGNLIALSLGLTPNFKSNFDLAEDAKLQLSKDTYDDDLDNLLAQIGDQYADLFLAAKNLSDAILLSDILRVNTEITKAPLSASMIKRYDEHHQDLTLLKALVRQQLPEKYKEIFFDQSKNGYAGYIDGGASQEEFYKFIKPILEKMDGTEELLVKLNREDLLRKQRTFDNGSIPHQIHLGELHAILRRQEDFYPFLKDNREKIEKILTFRIPYYVGPLARGNSRFAWMTRKSEETITPWNFEEVVDKGASAQSFIERMTNFDKNLPNEKVLPKHSLLYEYFTVYNELTKVKYVTEGMRKPAFLSGEQKKAIVDLLFKTNRKVTVKQLKEDYFKKIECFDSVEISGVEDRFNASLGTYHDLLKIIKDKDFLDNEENEDILEDIVLTLTLFEDREMIEERLKTYAHLFDDKVMKQLKRRRYTGWGRLSRKLINGIRDKQSGKTILDFLKSDGFANRNFMQLIHDDSLTFKEDIQKAQVSGQGDSLHEHIANLAGSPAIKKGILQTVKVVDELVKVMGRHKPENIVIEMARENQTTQKGQKNSRERMKRIEEGIKELGSQILKEHPVENTQLQNEKLYLYYLQNGRDMYVDQELDINRLSDYDVDHIVPQSFLKDDSIDNKVLTRSDKNRGKSDNVPSEEVVKKMKNYWRQLLNAKLITQRKFDNLTKAERGGLSELDKAGFIKRQLVETRQITKHVAQILDSRMNTKYDENDKLIREVKVITLKSKLVSDFRKDFQFYKVREINNYHHAHDAYLNAVVGTALIKKYPKLESEFVYGDYKVYDVRKMIAKSEQEIGKATAKYFFYSNIMNFFKTEITLANGEIRKRPLIETNGETGEIVWDKGRDFATVRKVLSMPQVNIVKKTEVQTGGFSKESILPKRNSDKLIARKKDWDPKKYGGFDSPTVAYSVLVVAKVEKGKSKKLKSVKELLGITIMERSSFEKNPIDFLEAKGYKEVKKDLIIKLPKYSLFELENGRKRMLASAGELQKGNELALPSKYVNFLYLASHYEKLKGSPEDNEQKQLFVEQHKHYLDEIIEQISEFSKRVILADANLDKVLSAYNKHRMNHRVEITEGILADECAALLCYFFRMPRQVFNAQKKAQSSTDGSSGSETPGTSESATPESSGSEVEFSHEYWMRHALTLAKRARDEREVPVGAVLVLNNRVIGEGWNRAIGLHDPTAHAEIMALRQGGLVMQNYRLIDATLYVTFEPCVMCAGAMIHSRIGRVVFGVRNAKTGAAGSLMDVLHYPGDKPIREQAENIIHLFTLTNLGAPAAFKYFDTTIDRKRYTSTKEVLDATLIHQSITGLYETRIDLSQLGGD

SEQ ID NO: 300 - protein, 1454 aa, synthetic construct
  REGION 1..1454: note = 124 Cas9 delta 792-872TadAins polypeptide sequence
MDKKYSIGLAIGTNSVGWAVITDEYKVPSKKFKVLGNTDRHSIKKNLIGALLFDSGETAEATRLKRTARRRYTRRKNRICYLQEIFSNEMAKVDDSFFHRLEESFLVEEDKKHERHPIFGNIVDEVAYHEKYPTIYHLRKKLVDSTDKADLRLIYLALAHMIKFRGHFLIEGDLNPDNSDVDKLFIQLVQTYNQLFEENPINASGVDAKAILSARLSKSRRLENLIAQLPGEKKNGLFGNLIALSLGLTPNFKSNFDLAEDAKLQLSKDTYDDDLDNLLAQIGDQYADLFLAAKNLSDAILLSDILRVNTEITKAPLSASMIKRYDEHHQDLTLLKALVRQQLPEKYKEIFFDQSKNGYAGYIDGGASQEEFYKFIKPILEKMDGTEELLVKLNREDLLRKQRTFDNGSIPHQIHLGELHAILRRQEDFYPFLKDNREKIEKILTFRIPYYVGPLARGNSRFAWMTRKSEETITPWNFEEVVDKGASAQSFIERMTNFDKNLPNEKVLPKHSLLYEYFTVYNELTKVKYVTEGMRKPAFLSGEQKKAIVDLLFKTNRKVTVKQLKEDYFKKIECFDSVEISGVEDRFNASLGTYHDLLKIIKDKDFLDNEENEDILEDIVLTLTLFEDREMIEERLKTYAHLFDDKVMKQLKRRRYTGWGRLSRKLINGIRDKQSGKTILDFLKSDGFANRNFMQLIHDDSLTFKEDIQKAQVSGQGDSLHEHIANLAGSPAIKKGILQTVKVVDELVKVMGRHKPENIVIEMARENQTTQKGQKNSRERMKRIEEGIKELGSEVEFSHEYWMRHALTLAKRARDEREVPVGAVLVLNNRVIGEGWNRAIGLHDPTAHAEIMALRQGGLVMQNYRLIDATLYVTFEPCVMCAGAMIHSRIGRVVFGVRNAKTGAAGSLMDVLHYPGMNHRVEITEGILADECAALLCYFFRMPRQVFNAQKKAQSSTDEEVVKKMKNYWRQLLNAKLITQRKFDNLTKAERGGLSELDKAGFIKRQLVETRQITKHVAQILDSRMNTKYDENDKLIREVKVITLKSKLVSDFRKDFQFYKVREINNYHHAHDAYLNAVVGTALIKKYPKLESEFVYGDYKVYDVRKMIAKSEQEIGKATAKYFFYSNIMNFFKTEITLANGEIRKRPLIETNGETGEIVWDKGRDFATVRKVLSMPQVNIVKKTEVQTGGFSKESILPKRNSDKLIARKKDWDPKKYGGFDSPTVAYSVLVVAKVEKGKSKKLKSVKELLGITIMERSSFEKNPIDFLEAKGYKEVKKDLIIKLPKYSLFELENGRKRMLASAGELQKGNELALPSKYVNFLYLASHYEKLKGSPEDNEQKQLFVEQHKHYLDEIIEQISEFSKRVILADANLDKVLSAYNKHRDKPIREQAENIIHLFTLTNLGAPAAFKYFDTTIDRKRYTSTKEVLDATLIHQSITGLYETRIDLSQLGGD

SEQ ID NO: 301 - protein, 1420 aa, synthetic construct
  REGION 1..1420: note = 125 Cas9 delta 792-906TadAins polypeptide sequence
MDKKYSIGLAIGTNSVGWAVITDEYKVPSKKFKVLGNTDRHSIKKNLIGALLFDSGETAEATRLKRTARRRYTRRKNRICYLQEIFSNEMAKVDDSFFHRLEESFLVEEDKKHERHPIFGNIVDEVAYHEKYPTIYHLRKKLVDSTDKADLRLIYLALAHMIKFRGHFLIEGDLNPDNSDVDKLFIQLVQTYNQLFEENPINASGVDAKAILSARLSKSRRLENLIAQLPGEKKNGLFGNLIALSLGLTPNFKSNFDLAEDAKLQLSKDTYDDDLDNLLAQIGDQYADLFLAAKNLSDAILLSDILRVNTEITKAPLSASMIKRYDEHHQDLTLLKALVRQQLPEKYKEIFFDQSKNGYAGYIDGGASQEEFYKFIKPILEKMDGTEELLVKLNREDLLRKQRTFDNGSIPHQIHLGELHAILRRQEDFYPFLKDNREKIEKILTFRIPYYVGPLARGNSRFAWMTRKSEETITPWNFEEVVDKGASAQSFIERMTNFDKNLPNEKVLPKHSLLYEYFTVYNELTKVKYVTEGMRKPAFLSGEQKKAIVDLLFKTNRKVTVKQLKEDYFKKIECFDSVEISGVEDRFNASLGTYHDLLKIIKDKDFLDNEENEDILEDIVLTLTLFEDREMIEERLKTYAHLFDDKVMKQLKRRRYTGWGRLSRKLINGIRDKQSGKTILDFLKSDGFANRNFMQLIHDDSLTFKEDIQKAQVSGQGDSLHEHIANLAGSPAIKKGILQTVKVVDELVKVMGRHKPENIVIEMARENQTTQKGQKNSRERMKRIEEGIKELGSEVEFSHEYWMRHALTLAKRARDEREVPVGAVLVLNNRVIGEGWNRAIGLHDPTAHAEIMALRQGGLVMQNYRLIDATLYVTFEPCVMCAGAMIHSRIGRVVFGVRNAKTGAAGSLMDVLHYPGMNHRVEITEGILADECAALLCYFFRMPRQVFNAQKKAQSSTDGLSELDKAGFIKRQLVETRQITKHVAQILDSRMNTKYDENDKLIREVKVITLKSKLVSDFRKDFQFYKVREINNYHHAHDAYLNAVVGTALIKKYPKLESEFVYGDYKVYDVRKMIAKSEQEIGKATAKYFFYSNIMNFFKTEITLANGEIRKRPLIETNGETGEIVWDKGRDFATVRKVLSMPQVNIVKKTEVQTGGFSKESILPKRNSDKLIARKKDWDPKKYGGFDSPTVAYSVLVVAKVEKGKSKKLKSVKELLGITIMERSSFEKNPIDFLEAKGYKEVKKDLIIKLPKYSLFELENGRKRMLASAGELQKGNELALPSKYVNFLYLASHYEKLKGSPEDNEQKQLFVEQHKHYLDEIIEQISEFSKRVILADANLDKVLSAYNKHRDKPIREQAENIIHLFTLTNLGAPAAFKYFDTTIDRKRYTSTKEVLDATLIHQSITGLYETRIDLSQLGGD

SEQ ID NO: 302 - protein, 1554 aa, synthetic construct
  REGION 1..1554: note = 126 TadA CP65ins 1003 polypeptide sequence
MDKKYSIGLAIGTNSVGWAVITDEYKVPSKKFKVLGNTDRHSIKKNLIGALLFDSGETAEATRLKRTARRRYTRRKNRICYLQEIFSNEMAKVDDSFFHRLEESFLVEEDKKHERHPIFGNIVDEVAYHEKYPTIYHLRKKLVDSTDKADLRLIYLALAHMIKFRGHFLIEGDLNPDNSDVDKLFIQLVQTYNQLFEENPINASGVDAKAILSARLSKSRRLENLIAQLPGEKKNGLFGNLIALSLGLTPNFKSNFDLAEDAKLQLSKDTYDDDLDNLLAQIGDQYADLFLAAKNLSDAILLSDILRVNTEITKAPLSASMIKRYDEHHQDLTLLKALVRQQLPEKYKEIFFDQSKNGYAGYIDGGASQEEFYKFIKPILEKMDGTEELLVKLNREDLLRKQRTFDNGSIPHQIHLGELHAILRRQEDFYPFLKDNREKIEKILTFRIPYYVGPLARGNSRFAWMTRKSEETITPWNFEEVVDKGASAQSFIERMTNFDKNLPNEKVLPKHSLLYEYFTVYNELTKVKYVTEGMRKPAFLSGEQKKAIVDLLFKTNRKVTVKQLKEDYFKKIECFDSVEISGVEDRFNASLGTYHDLLKIIKDKDFLDNEENEDILEDIVLTLTLFEDREMIEERLKTYAHLFDDKVMKQLKRRRYTGWGRLSRKLINGIRDKQSGKTILDFLKSDGFANRNFMQLIHDDSLTFKEDIQKAQVSGQGDSLHEHIANLAGSPAIKKGILQTVKVVDELVKVMGRHKPENIVIEMARENQTTQKGQKNSRERMKRIEEGIKELGSQILKEHPVENTQLQNEKLYLYYLQNGRDMYVDQELDINRLSDYDVDHIVPQSFLKDDSIDNKVLTRSDKNRGKSDNVPSEEVVKKMKNYWRQLLNAKLITQRKFDNLTKAERGGLSELDKAGFIKRQLVETRQITKHVAQILDSRMNTKYDENDKLIREVKVITLKSKLVSDFRKDFQFYKVREINNYHHAHDAYLNAVVGTALIKKYPKTAHAEIMALRQGGLVMQNYRLIDATLYVTFEPCVMCAGAMIHSRIGRVVFGVRNAKTGAAGSLMDVLHYPGMNHRVEITEGILADECAALLCYFFRMPRQVFNAQKKAQSSTDGSSGSETPGTSESATPESSGSEVEFSHEYWMRHALTLAKRARDEREVPVGAVLVLNNRVIGEGWNRAIGLHDPLESEFVYGDYKVYDVRKMIAKSEQEIGKATAKYFFYSNIMNFFKTEITLANGEIRKRPLIETNGETGEIVWDKGRDFATVRKVLSMPQVNIVKKTEVQTGGFSKESILPKRNSDKLIARKKDWDPKKYGGFDSPTVAYSVLVVAKVEKGKSKKLKSVKELLGITIMERSSFEKNPIDFLEAKGYKEVKKDLIIKLPKYSLFELENGRKRMLASAGELQKGNELALPSKYVNFLYLASHYEKLKGSPEDNEQKQLFVEQHKHYLDEIIEQISEFSKRVILADANLDKVLSAYNKHRDKPIREQAENIIHLFTLTNLGAPAAFKYFDTTIDRKRYTSTKEVLDATLIHQSITGLYETRIDLSQLGGD

SEQ ID NO: 303 - protein, 1554 aa, synthetic construct
  REGION 1..1554: note = 127 TadA CP65ins 1016 polypeptide sequence
MDKKYSIGLAIGTNSVGWAVITDEYKVPSKKFKVLGNTDRHSIKKNLIGALLFDSGETAEATRLKRTARRRYTRRKNRICYLQEIFSNEMAKVDDSFFHRLEESFLVEEDKKHERHPIFGNIVDEVAYHEKYPTIYHLRKKLVDSTDKADLRLIYLALAHMIKFRGHFLIEGDLNPDNSDVDKLFIQLVQTYNQLFEENPINASGVDAKAILSARLSKSRRLENLIAQLPGEKKNGLFGNLIALSLGLTPNFKSNFDLAEDAKLQLSKDTYDDDLDNLLAQIGDQYADLFLAAKNLSDAILLSDILRVNTEITKAPLSASMIKRYDEHHQDLTLLKALVRQQLPEKYKEIFFDQSKNGYAGYIDGGASQEEFYKFIKPILEKMDGTEELLVKLNREDLLRKQRTFDNGSIPHQIHLGELHAILRRQEDFYPFLKDNREKIEKILTFRIPYYVGPLARGNSRFAWMTRKSEETITPWNFEEVVDKGASAQSFIERMTNFDKNLPNEKVLPKHSLLYEYFTVYNELTKVKYVTEGMRKPAFLSGEQKKAIVDLLFKTNRKVTVKQLKEDYFKKIECFDSVEISGVEDRFNASLGTYHDLLKIIKDKDFLDNEENEDILEDIVLTLTLFEDREMIEERLKTYAHLFDDKVMKQLKRRRYTGWGRLSRKLINGIRDKQSGKTILDFLKSDGFANRNFMQLIHDDSLTFKEDIQKAQVSGQGDSLHEHIANLAGSPAIKKGILQTVKVVDELVKVMGRHKPENIVIEMARENQTTQKGQKNSRERMKRIEEGIKELGSQILKEHPVENTQLQNEKLYLYYLQNGRDMYVDQELDINRLSDYDVDHIVPQSFLKDDSIDNKVLTRSDKNRGKSDNVPSEEVVKKMKNYWRQLLNAKLITQRKFDNLTKAERGGLSELDKAGFIKRQLVETRQITKHVAQILDSRMNTKYDENDKLIREVKVITLKSKLVSDFRKDFQFYKVREINNYHHAHDAYLNAVVGTALIKKYPKLESEFVYGDYKVTAHAEIMALRQGGLVMQNYRLIDATLYVTFEPCVMCAGAMIHSRIGRVVFGVRNAKTGAAGSLMDVLHYPGMNHRVEITEGILADECAALLCYFFRMPRQVFNAQKKAQSSTDGSSGSETPGTSESATPESSGSEVEFSHEYWMRHALTLAKRARDEREVPVGAVLVLNNRVIGEGWNRAIGLHDPYDVRKMIAKSEQEIGKATAKYFFYSNIMNFFKTEITLANGEIRKRPLIETNGETGEIVWDKGRDFATVRKVLSMPQVNIVKKTEVQTGGFSKESILPKRNSDKLIARKKDWDPKKYGGFDSPTVAYSVLVVAKVEKGKSKKLKSVKELLGITIMERSSFEKNPIDFLEAKGYKEVKKDLIIKLPKYSLFELENGRKRMLASAGELQKGNELALPSKYVNFLYLASHYEKLKGSPEDNEQKQLFVEQHKHYLDEIIEQISEFSKRVILADANLDKVLSAYNKHRDKPIREQAENIIHLFTLTNLGAPAAFKYFDTTIDRKRYTSTKEVLDATLIHQSITGLYETRIDLSQLGGD

SEQ ID NO: 304 - protein, 1554 aa, synthetic construct
  REGION 1..1554: note = 128 TadA CP65ins 1022 polypeptide sequence
MDKKYSIGLAIGTNSVGWAVITDEYKVPSKKFKVLGNTDRHSIKKNLIGALLFDSGETAEATRLKRTARRRYTRRKNRICYLQEIFSNEMAKVDDSFFHRLEESFLVEEDKKHERHPIFGNIVDEVAYHEKYPTIYHLRKKLVDSTDKADLRLIYLALAHMIKFRGHFLIEGDLNPDNSDVDKLFIQLVQTYNQLFEENPINASGVDAKAILSARLSKSRRLENLIAQLPGEKKNGLFGNLIALSLGLTPNFKSNFDLAEDAKLQLSKDTYDDDLDNLLAQIGDQYADLFLAAKNLSDAILLSDILRVNTEITKAPLSASMIKRYDEHHQDLTLLKALVRQQLPEKYKEIFFDQSKNGYAGYIDGGASQEEFYKFIKPILEKMDGTEELLVKLNREDLLRKQRTFDNGSIPHQIHLGELHAILRRQEDFYPFLKDNREKIEKILTFRIPYYVGPLARGNSRFAWMTRKSEETITPWNFEEVVDKGASAQSFIERMTNFDKNLPNEKVLPKHSLLYEYFTVYNELTKVKYVTEGMRKPAFLSGEQKKAIVDLLFKTNRKVTVKQLKEDYFKKIECFDSVEISGVEDRFNASLGTYHDLLKIIKDKDFLDNEENEDILEDIVLTLTLFEDREMIEERLKTYAHLFDDKVMKQLKRRRYTGWGRLSRKLINGIRDKQSGKTILDFLKSDGFANRNFMQLIHDDSLTFKEDIQKAQVSGQGDSLHEHIANLAGSPAIKKGILQTVKVVDELVKVMGRHKPENIVIEMARENQTTQKGQKNSRERMKRIEEGIKELGSQILKEHPVENTQLQNEKLYLYYLQNGRDMYVDQELDINRLSDYDVDHIVPQSFLKDDSIDNKVLTRSDKNRGKSDNVPSEEVVKKMKNYWRQLLNAKLITQRKFDNLTKAERGGLSELDKAGFIKRQLVETRQITKHVAQILDSRMNTKYDENDKLIREVKVITLKSKLVSDFRKDFQFYKVREINNYHHAHDAYLNAVVGTALIKKYPKLESEFVYGDYKVYDVRKMITAHAEIMALRQGGLVMQNYRLIDATLYVTFEPCVMCAGAMIHSRIGRVVFGVRNAKTGAAGSLMDVLHYPGMNHRVEITEGILADECAALLCYFFRMPRQVFNAQKKAQSSTDGSSGSETPGTSESATPESSGSEVEFSHEYWMRHALTLAKRARDEREVPVGAVLVLNNRVIGEGWNRAIGLHDPAKSEQEIGKATAKYFFYSNIMNFFKTEITLANGEIRKRPLIETNGETGEIVWDKGRDFATVRKVLSMPQVNIVKKTEVQTGGFSKESILPKRNSDKLIARKKDWDPKKYGGFDSPTVAYSVLVVAKVEKGKSKKLKSVKELLGITIMERSSFEKNPIDFLEAKGYKEVKKDLIIKLPKYSLFELENGRKRMLASAGELQKGNELALPSKYVNFLYLASHYEKLKGSPEDNEQKQLFVEQHKHYLDEIIEQISEFSKRVILADANLDKVLSAYNKHRDKPIREQAENIIHLFTLTNLGAPAAFKYFDTTIDRKRYTSTKEVLDATLIHQSITGLYETRIDLSQLGGD

SEQ ID NO: 305 - protein, 1554 aa, synthetic construct
  REGION 1..1554: note = 129 TadA CP65ins 1029 polypeptide sequence
MDKKYSIGLAIGTNSVGWAVITDEYKVPSKKFKVLGNTDRHSIKKNLIGALLFDSGETAEATRLKRTARRRYTRRKNRICYLQEIFSNEMAKVDDSFFHRLEESFLVEEDKKHERHPIFGNIVDEVAYHEKYPTIYHLRKKLVDSTDKADLRLIYLALAHMIKFRGHFLIEGDLNPDNSDVDKLFIQLVQTYNQLFEENPINASGVDAKAILSARLSKSRRLENLIAQLPGEKKNGLFGNLIALSLGLTPNFKSNFDLAEDAKLQLSKDTYDDDLDNLLAQIGDQYADLFLAAKNLSDAILLSDILRVNTEITKAPLSASMIKRYDEHHQDLTLLKALVRQQLPEKYKEIFFDQSKNGYAGYIDGGASQEEFYKFIKPILEKMDGTEELLVKLNREDLLRKQRTFDNGSIPHQIHLGELHAILRRQEDFYPFLKDNREKIEKILTFRIPYYVGPLARGNSRFAWMTRKSEETITPWNFEEVVDKGASAQSFIERMTNFDKNLPNEKVLPKHSLLYEYFTVYNELTKVKYVTEGMRKPAFLSGEQKKAIVDLLFKTNRKVTVKQLKEDYFKKIECFDSVEISGVEDRFNASLGTYHDLLKIIKDKDFLDNEENEDILEDIVLTLTLFEDREMIEERLKTYAHLFDDKVMKQLKRRRYTGWGRLSRKLINGIRDKQSGKTILDFLKSDGFANRNFMQLIHDDSLTFKEDIQKAQVSGQGDSLHEHIANLAGSPAIKKGILQTVKVVDELVKVMGRHKPENIVIEMARENQTTQKGQKNSRERMKRIEEGIKELGSQILKEHPVENTQLQNEKLYLYYLQNGRDMYVDQELDINRLSDYDVDHIVPQSFLKDDSIDNKVLTRSDKNRGKSDNVPSEEVVKKMKNYWRQLLNAKLITQRKFDNLTKAERGGLSELDKAGFIKRQLVETRQITKHVAQILDSRMNTKYDENDKLIREVKVITLKSKLVSDFRKDFQFYKVREINNYHHAHDAYLNAVVGTALIKKYPKLESEFVYGDYKVYDVRKMIAKSEQEITAHAEIMALRQGGLVMQNYRLIDATLYVTFEPCVMCAGAMIHSRIGRVVFGVRNAKTGAAGSLMDVLHYPGMNHRVEITEGILADECAALLCYFFRMPRQVFNAQKKAQSSTDGSSGSETPGTSESATPESSGSEVEFSHEYWMRHALTLAKRARDEREVPVGAVLVLNNRVIGEGWNRAIGLHDPGKATAKYFFYSNIMNFFKTEITLANGEIRKRPLIETNGETGEIVWDKGRDFATVRKVLSMPQVNIVKKTEVQTGGFSKESILPKRNSDKLIARKKDWDPKKYGGFDSPTVAYSVLVVAKVEKGKSKKLKSVKELLGITIMERSSFEKNPIDFLEAKGYKEVKKDLIIKLPKYSLFELENGRKRMLASAGELQKGNELALPSKYVNFLYLASHYEKLKGSPEDNEQKQLFVEQHKHYLDEIIEQISEFSKRVILADANLDKVLSAYNKHRDKPIREQAENIIHLFTLTNLGAPAAFKYFDTTIDRKRYTSTKEVLDATLIHQSITGLYETRIDLSQLGGD

SEQ ID NO: 306 - protein, 1554 aa, synthetic construct
  REGION 1..1554: note = 130 TadA CP65ins 1041 polypeptide sequence
MDKKYSIGLAIGTNSVGWAVITDEYKVPSKKFKVLGNTDRHSIKKNLIGALLFDSGETAEATRLKRTARRRYTRRKNRICYLQEIFSNEMAKVDDSFFHRLEESFLVEEDKKHERHPIFGNIVDEVAYHEKYPTIYHLRKKLVDSTDKADLRLIYLALAHMIKFRGHFLIEGDLNPDNSDVDKLFIQLVQTYNQLFEENPINASGVDAKAILSARLSKSRRLENLIAQLPGEKKNGLFGNLIALSLGLTPNFKSNFDLAEDAKLQLSKDTYDDDLDNLLAQIGDQYADLFLAAKNLSDAILLSDILRVNTEITKAPLSASMIKRYDEHHQDLTLLKALVRQQLPEKYKEIFFDQSKNGYAGYIDGGASQEEFYKFIKPILEKMDGTEELLVKLNREDLLRKQRTFDNGSIPHQIHLGELHAILRRQEDFYPFLKDNREKIEKILTFRIPYYVGPLARGNSRFAWMTRKSEETITPWNFEEVVDKGASAQSFIERMTNFDKNLPNEKVLPKHSLLYEYFTVYNELTKVKYVTEGMRKPAFLSGEQKKAIVDLLFKTNRKVTVKQLKEDYFKKIECFDSVEISGVEDRFNASLGTYHDLLKIIKDKDFLDNEENEDILEDIVLTLTLFEDREMIEERLKTYAHLFDDKVMKQLKRRRYTGWGRLSRKLINGIRDKQSGKTILDFLKSDGFANRNFMQLIHDDSLTFKEDIQKAQVSGQGDSLHEHIANLAGSPAIKKGILQTVKVVDELVKVMGRHKPENIVIEMARENQTTQKGQKNSRERMKRIEEGIKELGSQILKEHPVENTQLQNEKLYLYYLQNGRDMYVDQELDINRLSDYDVDHIVPQSFLKDDSIDNKVLTRSDKNRGKSDNVPSEEVVKKMKNYWRQLLNAKLITQRKFDNLTKAERGGLSELDKAGFIKRQLVETRQITKHVAQILDSRMNTKYDENDKLIREVKVITLKSKLVSDFRKDFQFYKVREINNYHHAHDAYLNAVVGTALIKKYPKLESEFVYGDYKVYDVRKMIAKSEQEIGKATAKYFFYSTAHAEIMALRQGGLVMQNYRLIDATLYVTFEPCVMCAGAMIHSRIGRVVFGVRNAKTGAAGSLMDVLHYPGMNHRVEITEGILADECAALLCYFFRMPRQVFNAQKKAQSSTDGSSGSETPGTSESATPESSGSEVEFSHEYWMRHALTLAKRARDEREVPVGAVLVLNNRVIGEGWNRAIGLHDPNIMNFFKTEITLANGEIRKRPLIETNGETGEIVWDKGRDFATVRKVLSMPQVNIVKKTEVQTGGFSKESILPKRNSDKLIARKKDWDPKKYGGFDSPTVAYSVLVVAKVEKGKSKKLKSVKELLGITIMERSSFEKNPIDFLEAKGYKEVKKDLIIKLPKYSLFELENGRKRMLASAGELQKGNELALPSKYVNFLYLASHYEKLKGSPEDNEQKQLFVEQHKHYLDEIIEQISEFSKRVILADANLDKVLSAYNKHRDKPIREQAENIIHLFTLTNLGAPAAFKYFDTTIDRKRYTSTKEVLDATLIHQSITGLYETRIDLSQLGGD

SEQ ID NO: 307 - protein, 1554 aa, synthetic construct
  REGION 1..1554: note = 131 TadA CP65ins 1054 polypeptide sequence
MDKKYSIGLAIGTNSVGWAVITDEYKVPSKKFKVLGNTDRHSIKKNLIGALLFDSGETAEATRLKRTARRRYTRRKNRICYLQEIFSNEMAKVDDSFFHRLEESFLVEEDKKHERHPIFGNIVDEVAYHEKYPTIYHLRKKLVDSTDKADLRLIYLALAHMIKFRGHFLIEGDLNPDNSDVDKLFIQLVQTYNQLFEENPINASGVDAKAILSARLSKSRRLENLIAQLPGEKKNGLFGNLIALSLGLTPNFKSNFDLAEDAKLQLSKDTYDDDLDNLLAQIGDQYADLFLAAKNLSDAILLSDILRVNTEITKAPLSASMIKRYDEHHQDLTLLKALVRQQLPEKYKEIFFDQSKNGYAGYIDGGASQEEFYKFIKPILEKMDGTEELLVKLNREDLLRKQRTFDNGSIPHQIHLGELHAILRRQEDFYPFLKDNREKIEKILTFRIPYYVGPLARGNSRFAWMTRKSEETITPWNFEEVVDKGASAQSFIERMTNFDKNLPNEKVLPKHSLLYEYFTVYNELTKVKYVTEGMRKPAFLSGEQKKAIVDLLFKTNRKVTVKQLKEDYFKKIECFDSVEISGVEDRFNASLGTYHDLLKIIKDKDFLDNEENEDILEDIVLTLTLFEDREMIEERLKTYAHLFDDKVMKQLKRRRYTGWGRLSRKLINGIRDKQSGKTILDFLKSDGFANRNFMQLIHDDSLTFKEDIQKAQVSGQGDSLHEHIANLAGSPAIKKGILQTVKVVDELVKVMGRHKPENIVIEMARENQTTQKGQKNSRERMKRIEEGIKELGSQILKEHPVENTQLQNEKLYLYYLQNGRDMYVDQELDINRLSDYDVDHIVPQSFLKDDSIDNKVLTRSDKNRGKSDNVPSEEVVKKMKNYWRQLLNAKLITQRKFDNLTKAERGGLSELDKAGFIKRQLVETRQITKHVAQILDSRMNTKYDENDKLIREVKVITLKSKLVSDFRKDFQFYKVREINNYHHAHDAYLNAVVGTALIKKYPKLESEFVYGDYKVYDVRKMIAKSEQEIGKATAKYFFYSNIMNFFKTEITLANTAHAEIMALRQGGLVMQNYRLIDATLYVTFEPCVMCAGAMIHSRIGRVVFGVRNAKTGAAGSLMDVLHYPGMNHRVEITEGILADECAALLCYFFRMPRQVFNAQKKAQSSTDGSSGSETPGTSESATPESSGSEVEFSHEYWMRHALTLAKRARDEREVPVGAVLVLNNRVIGEGWNRAIGLHDPGEIRKRPLIETNGETGEIVWDKGRDFATVRKVLSMPQVNIVKKTEVQTGGFSKESILPKRNSDKLIARKKDWDPKKYGGFDSPTVAYSVLVVAKVEKGKSKKLKSVKELLGITIMERSSFEKNPIDFLEAKGYKEVKKDLIIKLPKYSLFELENGRKRMLASAGELQKGNELALPSKYVNFLYLASHYEKLKGSPEDNEQKQLFVEQHKHYLDEIIEQISEFSKRVILADANLDKVLSAYNKHRDKPIREQAENIIHLFTLTNLGAPAAFKYFDTTIDRKRYTSTKEVLDATLIHQSITGLYETRIDLSQLGGD

SEQ ID NO: 308 - protein, 1554 aa, synthetic construct
  REGION 1..1554: note = 132 TadA CP65ins 1246 polypeptide sequence
MDKKYSIGLAIGTNSVGWAVITDEYKVPSKKFKVLGNTDRHSIKKNLIGALLFDSGETAEATRLKRTARRRYTRRKNRICYLQEIFSNEMAKVDDSFFHRLEESFLVEEDKKHERHPIFGNIVDEVAYHEKYPTIYHLRKKLVDSTDKADLRLIYLALAHMIKFRGHFLIEGDLNPDNSDVDKLFIQLVQTYNQLFEENPINASGVDAKAILSARLSKSRRLENLIAQLPGEKKNGLFGNLIALSLGLTPNFKSNFDLAEDAKLQLSKDTYDDDLDNLLAQIGDQYADLFLAAKNLSDAILLSDILRVNTEITKAPLSASMIKRYDEHHQDLTLLKALVRQQLPEKYKEIFFDQSKNGYAGYIDGGASQEEFYKFIKPILEKMDGTEELLVKLNREDLLRKQRTFDNGSIPHQIHLGELHAILRRQEDFYPFLKDNREKIEKILTFRIPYYVGPLARGNSRFAWMTRKSEETITPWNFEEVVDKGASAQSFIERMTNFDKNLPNEKVLPKHSLLYEYFTVYNELTKVKYVTEGMRKPAFLSGEQKKAIVDLLFKTNRKVTVKQLKEDYFKKIECFDSVEISGVEDRFNASLGTYHDLLKIIKDKDFLDNEENEDILEDIVLTLTLFEDREMIEERLKTYAHLFDDKVMKQLKRRRYTGWGRLSRKLINGIRDKQSGKTILDFLKSDGFANRNFMQLIHDDSLTFKEDIQKAQVSGQGDSLHEHIANLAGSPAIKKGILQTVKVVDELVKVMGRHKPENIVIEMARENQTTQKGQKNSRERMKRIEEGIKELGSQILKEHPVENTQLQNEKLYLYYLQNGRDMYVDQELDINRLSDYDVDHIVPQSFLKDDSIDNKVLTRSDKNRGKSDNVPSEEVVKKMKNYWRQLLNAKLITQRKFDNLTKAERGGLSELDKAGFIKRQLVETRQITKHVAQILDSRMNTKYDENDKLIREVKVITLKSKLVSDFRKDFQFYKVREINNYHHAHDAYLNAVVGTALIKKYPKLESEFVYGDYKVYDVRKMIAKSEQEIGKATAKYFFYSNIMNFFKTEITLANGEIRKRPLIETNGETGEIVWDKGRDFATVRKVLSMPQVNIVKKTEVQTGGFSKESILPKRNSDKLIARKKDWDPKKYGGFDSPTVAYSVLVVAKVEKGKSKKLKSVKELLGITIMERSSFEKNPIDFLEAKGYKEVKKDLIIKLPKYSLFELENGRKRMLASAGELQKGNELALPSKYVNFLYLASHYEKLKGTAHAEIMALRQGGLVMQNYRLIDATLYVTFEPCVMCAGAMIHSRIGRVVFGVRNAKTGAAGSLMDVLHYPGMNHRVEITEGILADECAALLCYFFRMPRQVFNAQKKAQSSTDGSSGSETPGTSESATPESSGSEVEFSHEYWMRHALTLAKRARDEREVPVGAVLVLNNRVIGEGWNRAIGLHDPSPEDNEQKQLFVEQHKHYLDEIIEQISEFSKRVILADANLDKVLSAYNKHRDKPIREQAENIIHLFTLTNLGAPAAFKYFDTTIDRKRYTSTKEVLDATLIHQSITGLYETRIDLSQLGGD

SEQ ID NO: 309 - protein, 160 aa, Staphylococcus aureus
  REGION 1..160: note = MISC_FEATURE - TadA polypeptide sequence
MGSHMTNDIYFMTLAIEEAKKAAQLGEVPIGAIITKDDEVIARAHNLRETLQQPTAHAEHIAIERAAKVLGSWRLEGCTLYVTLEPCVMCAGTIVMSRIPRVVYGADDPKGGCSGSLMNLLQQSNFNHRAIVDKGVLKEACSTLLTTFFKNLRANKKSTN

SEQ ID NO: 310 - protein, 161 aa, Bacillus subtilis
  REGION 1..161: note = MISC_FEATURE - TadA polypeptide sequence
MTQDELYMKEAIKEAKKAEEKGEVPIGAVLVINGEIIARAHNLRETEQRSIAHAEMLVIDEACKALGTWRLEGATLYVTLEPCPMCAGAVVLSRVEKVVFGAFDPKGGCSGTLMNLLQEERFNHQAEVVSGVLEEECGGMLSAFFRELRKKKKAARKNLSE

SEQ ID NO: 311 - protein, 183 aa, Salmonella enterica
  REGION 1..183: note = MISC_FEATURE - TadA polypeptide sequence
  source 1..183: note = serovar Typhimurium
MPPAFITGVTSLSDVELDHEYWMRHALTLAKRAWDEREVPVGAVLVHNHRVIGEGWNRPIGRHDPTAHAEIMALRQGGLVLQNYRLLDTTLYVTLEPCVMCAGAMVHSRIGRVVFGARDAKTGAAGSLIDVLHHPGMNHRVEIIEGVLRDECATLLSDFFRMRRQEIKALKKADRAEGAGPAV

SEQ ID NO: 312 - protein, 164 aa, Shewanella putrefaciens
  REGION 1..164: note = MISC_FEATURE - TadA polypeptide sequence
MDEYWMQVAMQMAEKAEAAGEVPVGAVLVKDGQQIATGYNLSISQHDPTAHAEILCLRSAGKKLENYRLLDATLYITLEPCAMCAGAMVHSRIARVVYGARDEKTGAAGTVVNLLQHPAFNHQVEVTSGVLAEACSAQLSRFFKRRRDEKKALKLAQRAQQGIE

SEQ ID NO: 313 - protein, 173 aa, Haemophilus influenzae
  REGION 1..173: note = MISC_FEATURE - TadA polypeptide sequence
MDAAKVRSEFDEKMMRYALELADKAEALGEIPVGAVLVDDARNIIGEGWNLSIVQSDPTAHAEIIALRNGAKNIQNYRLLNSTLYVTLEPCTMCAGAILHSRIKRLVFGASDYKTGAIGSRFHFFDDYKMNHTLEITSGVLAEECSQKLSTFFQKRREEKKIEKALLKSLSDK

SEQ ID NO: 314 - protein, 161 aa, Caulobacter crescentus
  REGION 1..161: note = MISC_FEATURE - TadA polypeptide sequence
MRTDESEDQDHRMMRLALDAARAAAEAGETPVGAVILDPSTGEVIATAGNGPIAAHDPTAHAEIAAMRAAAAKLGNYRLTDLTLVVTLEPCAMCAGAISHARIGRVVFGADDPKGGAVVHGPKFFAQPTCHWRPEVTGGVLADESADLLRGFFRARRKAKI

SEQ ID NO: 315 - protein, 179 aa, Geobacter sulfurreducens
  REGION 1..179: note = MISC_FEATURE - TadA polypeptide sequence
MSSLKKTPIRDDAYWMGKAIREAAKAAARDEVPIGAVIVRDGAVIGRGHNLREGSNDPSAHAEMIAIRQAARRSANWRLTGATLYVTLEPCLMCMGAIILARLERVVFGCYDPKGGAAGSLYDLSADPRLNHQVRLSPGVCQEECGTMLSDFFRDLRRRKKAKATPALFIDERKVPPEP

SEQ ID NO: 316 - protein, 167 aa, synthetic construct
  REGION 1..167: note = TadA*8 polypeptide sequence
MSEVEFSHEYWMRHALTLAKRARDEREVPVGAVLVLNNRVIGEGWNRAIGLHDPTAHAEIMALRQGGLVMQNYRLIDATLYVTFEPCVMCAGAMIHSRIGRVVFGVRNAKTGAAGSLMDVLHYPGMNHRVEITEGILADECAALLCTFFRMPRQVFNAQKKAQSSTD

SEQ ID NO: 317 - RNA, 80 nt, synthetic construct
  misc_feature 1..80: note = gRNA scaffold polynucleotide sequence
  source 1..80: mol_type = other RNA
gttttagagctagaaatagcaagttaaaataaggctagtccgttatcaacttgaaaaagtggcaccgagtcggtgctttt

SEQ ID NO: 318 - RNA, 125 nt, synthetic construct
  misc_feature 1..125: note = gRNA scaffold polynucleotide sequence
  source 1..125: mol_type = other RNA
gtttttgtactctcaagatttaagtaactgtacaacgaaacttacacagttacttaaatcttgcagaagctacaaagataaggcttcatgccgaaatcaacaccctgtcattttatggcagggtg

SEQ ID NO: 319 - RNA, 76 nt, Streptococcus pyogenes
  misc_feature 1..76: note = S. pyogenes gRNA scaffold oligonucleotide sequence
  source 1..76: mol_type = other RNA
gttttagagctagaaatagcaagttaaaataaggctagtccgttatcaacttgaaaaagtggcaccgagtcggtgc

SEQ ID NO: 320 - RNA, 84 nt, Staphylococcus aureus
  misc_feature 1..84: note = S. aureus gRNA scaffold oligonucleotide sequence
  source 1..84: mol_type = other RNA
gttttagtactctgtaatgaaaattacagaatctactaaaacaaggcaaaatgccgtgtttatctcgtcaacttgttggcgaga

SEQ ID NO: 321 - RNA, 97 nt, Bacillus hisashii
  misc_feature 1..97: note = BhCas12b gRNA scaffold oligonucleotide sequence
  source 1..97: mol_type = other RNA
gttctgtcttttggtcaggacaaccgtctagctataagtgctgcagggtgtgagaaactcctattgctggacgatgtctcttacgaggcattagcac

SEQ ID NO: 322 - RNA, 88 nt, Bacillus sp.
  misc_feature 1..88: note = BvCas12b gRNA scaffold oligonucleotide sequence
  source 1..88: mol_type = other RNA
gacctatagggtcaatgaatctgtgcgtgtgccataagtaattaaaaattacccaccacaggagcacctgaaaacaggtgcttggcac

SEQ ID NO: 323 - RNA, 80 nt, synthetic construct
  misc_feature 1..80: note = gRNA scaffold nucleotide sequence; oligonucleotide sequence
  modified_base 78..80: mod_base = um
  misc_feature 78..80: note = In embodiments, a nucleotide(s) is linked to the preceding 5' nucleotide by a 3' phosphorothioate internucleotide linkage
  source 1..80: mol_type = other RNA
gttttagagctagaaatagcaagttaaaataaggctagtccgttatcaacttgaaaaagtgggaccgagtcggtgctttt

SEQ ID NO: 324 - RNA, 80 nt, synthetic construct; identical to SEQ ID NO: 317
  misc_feature 1..80: note = gRNA scaffold nucleotide sequence
  misc_feature 78..80: note = In embodiments, a nucleotide(s) is linked to the preceding 5' nucleotide by a 3' phosphorothioate internucleotide linkage
  modified_base 78..80: mod_base = um
  source 1..80: mol_type = other RNA

SEQ ID NO: 325 - RNA, 117 nt, Bacillus hisashii
  misc_feature 1..117: note = BhCas12b gRNA scaffold + guide sequence; oligonucleotide sequence
  misc_feature 1..97: note = BhCas12b sgRNA scaffold
  source 1..117: mol_type = other RNA
gttctgtcttttggtcaggacaaccgtctagctataagtgctgcagggtgtgagaaactcctattgctggacgatgtctcttacgaggcattagcacnnnnnnnnnnnnnnnnnnnn

SEQ ID NO: 326 - RNA, 108 nt, Bacillus sp.
  misc_feature 1..108: note = BvCas12b gRNA scaffold + guide sequence; oligonucleotide sequence
  misc_feature 1..88: note = BvCas12b gRNA scaffold
  source 1..108: mol_type = other RNA
gacctatagggtcaatgaatctgtgcgtgtgccataagtaattaaaaattacccaccacaggagcacctgaaaacaggtgcttggcacnnnnnnnnnnnnnnnnnnnn

SEQ ID NO: 327 - RNA, 119 nt, Alicyclobacillus acidiphilus
  misc_feature 1..119: note = AaCas12b gRNA scaffold + guide sequence; oligonucleotide sequence
  misc_feature 1..99: note = AaCas12b gRNA scaffold
  source 1..119: mol_type = other RNA
gtctaaaggacagaatttttcaacgggtgtgccaatggccactttccaggtggcaaagcccgttgaacttctcaaaaagaacgatctgagaagtggcacnnnnnnnnnnnnnnnnnnnn

SEQ ID NO: 328 - protein, 29 aa, synthetic construct
  REGION 1..29: note = synthetic polypeptide sequence
PKKKRKVEGADKRTADGSEFESPKKKRKV

SEQ ID NO: 329 - protein, 23 aa, synthetic construct
  REGION 1..23: note = synthetic peptide sequence
RKSGKIAAIVVKRPRKPKKKRKV

SEQ ID NO: 330 - protein, 8 aa, synthetic construct
  REGION 1..8: note = synthetic peptide sequence
SGGSSGGS

SEQ ID NO: 331 - protein, 1609 aa, synthetic construct
  REGION 1..1609: note = pNMG-B335ABE8.1_Y147T_CP5_NGC PAM_monomer polypeptide sequence
MSEVEFSHEYWMRHALTLAKRARDEREVPVGAVLVLNNRVIGEGWNRAIGLHDPTAHAEIMALRQGGLVMQNYRLIDATLYVTFEPCVMCAGAMIHSRIGRVVFGVRNAKTGAAGSLMDVLHYPGMNHRVEITEGILADECAALLCTFFRMPRQVFNAQKKAQSSTDSGGSSGGSSGSETPGTSESATPESSGGSSGGSEIGKATAKYFFYSNIMNFFKTEITLANGEIRKRPLIETNGETGEIVWDKGRDFATVRKVLSMPQVNIVKKTEVQTGGFSKESILPKRNSDKLIARKKDWDPKKYGGFMQPTVAYSVLVVAKVEKGKSKKLKSVKELLGITIMERSSFEKNPIDFLEAKGYKEVKKDLIIKLPKYSLFELENGRKRMLASAKFLQKGNELALPSKYVNFLYLASHYEKLKGSPEDNEQKQLFVEQHKHYLDEIIEQISEFSKRVILADANLDKVLSAYNKHRDKPIREQAENIIHLFTLTNLGAPRAFKYFDTTIARKEYRSTKEVLDATLIHQSITGLYETRIDLSQLGGDGGSGGSGGSGGSGGSGGSGGMDKKYSIGLAIGTNSVGWAVITDEYKVPSKKFKVLGNTDRHSIKKNLIGALLFDSGETAEATRLKRTARRRYTRRKNRICYLQEIFSNEMAKVDDSFFHRLEESFLVEEDKKHERHPIFGNIVDEVAYHEKYPTIYHLRKKLVDSTDKADLRLIYLALAHMIKFRGHFLIEGDLNPDNSDVDKLFIQLVQTYNQLFEENPINASGVDAKAILSARLSKSRRLENLIAQLPGEKKNGLFGNLIALSLGLTPNFKSNFDLAEDAKLQLSKDTYDDDLDNLLAQIGDQYADLFLAAKNLSDAILLSDILRVNTEITKAPLSASMIKRYDEHHQDLTLLKALVRQQLPEKYKEIFFDQSKNGYAGYIDGGASQEEFYKFIKPILEKMDGTEELLVKLNREDLLRKQRTFDNGSIPHQIHLGELHAILRRQEDFYPFLKDNREKIEKILTFRIPYYVGPLARGNSRFAWMTRKSEETITPWNFEEVVDKGASAQSFIERMTNFDKNLPNEKVLPKHSLLYEYFTVYNELTKVKYVTEGMRKPAFLSGEQKKAIVDLLFKTNRKVTVKQLKEDYFKKIECFDSVEISGVEDRFNASLGTYHDLLKIIKDKDFLDNEENEDILEDIVLTLTLFEDREMIEERLKTYAHLFDDKVMKQLKRRRYTGWGRLSRKLINGIRDKQSGKTILDFLKSDGFANRNFMQLIHDDSLTFKEDIQKAQVSGQGDSLHEHIANLAGSPAIKKGILQTVKVVDELVKVMGRHKPENIVIEMARENQTTQKGQKNSRERMKRIEEGIKELGSQILKEHPVENTQLQNEKLYLYYLQNGRDMYVDQELDINRLSDYDVDHIVPQSFLKDDSIDNKVLTRSDKNRGKSDNVPSEEVVKKMKNYWRQLLNAKLITQRKFDNLTKAERGGLSELDKAGFIKRQLVETRQITKHVAQILDSRMNTKYDENDKLIREVKVITLKSKLVSDFRKDFQFYKVREINNYHHAHDAYLNAVVGTALIKKYPKLESEFVYGDYKVYDVRKMIAKSEQEGADKRTADGSEFESPKKKRKV

SEQ ID NO: 332 - protein, 1807 aa, synthetic construct
  REGION 1..1807: note = pNMG-357_ABE8.14 with NGC PAMCP5 polypeptide sequence
  REGION 1..174: note = MISC_FEATURE - Adenosine deaminase sequence
  REGION 175..198: note = MISC_FEATURE - Linker sequence
  REGION 199..365: note = MISC_FEATURE - Adenosine deaminase sequence
  REGION 366..397: note = MISC_FEATURE - Linker sequence
  REGION 398..738: note = MISC_FEATURE - Sequence derived from Cas9
  REGION 739..759: note = MISC_FEATURE - Linker sequence
  REGION 760..1785: note = MISC_FEATURE - Sequence derived from Cas9
  REGION 1786..1807: note = MISC_FEATURE - Bipartite nuclear localization sequence
MSEVEFSHEYWMRHALTLAKRAWDEREVPVGAVLVHNNRVIGEGWNRPIGRHDPTAHAEIMALRQGGLVMQNYRLIDATLYVTLEPCVMCAGAMIHSRIGRVVFGARDAKTGAAGSLMDVLHHPGMNHRVEITEGILADECAALLSDFFRMRRQEIKAQKKAQSSTDGGSSGGSSGSETPGTSESATPESSGGSSGGSMSEVEFSHEYWMRHALTLAKRARDEREVPVGAVLVLNNRVIGEGWNRAIGLHDPTAHAEIMALRQGGLVMQNYRLIDATLYVTFEPCVMCAGAMIHSRIGRVVFGVRNAKTGAAGSLMDVLHYPGMNHRVEITEGILADECAALLCTFFRMPRQVFNAQKKAQSSTDSGGSSGGSSGSETPGTSESATPESSGGSSGGSEIGKATAKYFFYSNIMNFFKTEITLANGEIRKRPLIETNGETGEIVWDKGRDFATVRKVLSMPQVNIVKKTEVQTGGFSKESILPKRNSDKLIARKKDWDPKKYGGFMQPTVAYSVLVVAKVEKGKSKKLKSVKELLGITIMERSSFEKNPIDFLEAKGYKEVKKDLIIKLPKYSLFELENGRKRMLASAKFLQKGNELALPSKYVNFLYLASHYEKLKGSPEDNEQKQLFVEQHKHYLDEIIEQISEFSKRVILADANLDKVLSAYNKHRDKPIREQAENIIHLFTLTNLGAPRAFKYFDTTIARKEYRSTKEVLDATLIHQSITGLYETRIDLSQLGGDGGSGGSGGSGGSGGSGGSGGMDKKYSIGLAIGTNSVGWAVITDEYKVPSKKFKVLGNTDRHSIKKNLIGALLFDSGETAEATRLKRTARRRYTRRKNRICYLQEIFSNEMAKVDDSFFHRLEESFLVEEDKKHERHPIFGNIVDEVAYHEKYPTIYHLRKKLVDSTDKADLRLIYLALAHMIKFRGHFLIEGDLNPDNSDVDKLFIQLVQTYNQLFEENPINASGVDAKAILSARLSKSRRLENLIAQLPGEKKNGLFGNLIALSLGLTPNFKSNFDLAEDAKLQLSKDTYDDDLDNLLAQIGDQYADLFLAAKNLSDAILLSDILRVNTEITKAPLSASMIKRYDEHHQDLTLLKALVRQQLPEKYKEIFFDQSKNGYAGYIDGGASQEEFYKFIKPILEKMDGTEELLVKLNREDLLRKQRTFDNGSIPHQIHLGELHAILRRQEDFYPFLKDNREKIEKILTFRIPYYVGPLARGNSRFAWMTRKSEETITPWNFEEVVDKGASAQSFIERMTNFDKNLPNEKVLPKHSLLYEYFTVYNELTKVKYVTEGMRKPAFLSGEQKKAIVDLLFKTNRKVTVKQLKEDYFKKIECFDSVEISGVEDRFNASLGTYHDLLKIIKDKDFLDNEENEDILEDIVLTLTLFEDREMIEERLKTYAHLFDDKVMKQLKRRRYTGWGRLSRKLINGIRDKQSGKTILDFLKSDGFANRNFMQLIHDDSLTFKEDIQKAQVSGQGDSLHEHIANLAGSPAIKKGILQTVKVVDELVKVMGRHKPENIVIEMARENQTTQKGQKNSRERMKRIEEGIKELGSQILKEHPVENTQLQNEKLYLYYLQNGRDMYVDQELDINRLSDYDVDHIVPQSFLKDDSIDNKVLTRSDKNRGKSDNVPSEEVVKKMKNYWRQLLNAKLITQRKFDNLTKAERGGLSELDKAGFIKRQLVETRQITKHVAQILDSRMNTKYDENDKLIREVKVITLKSKLVSDFRKDFQFYKVREINNYHHAHDAYLNAVVGTALIKKYPKLESEFVYGDYKVYDVRKMIAKSEQEGADKRTADGSEFESPKKKRKV

SEQ ID NO: 333 - protein, 1588 aa, synthetic construct
  REGION 1..1588: note = ABE8.8-m polypeptide sequence
  REGION 1..167: note = MISC_FEATURE - Adenosine deaminase sequence
  REGION 168..199: note = MISC_FEATURE - Linker sequence
  REGION 200..1566: note = MISC_FEATURE - Sequence derived from Cas9
  REGION 1567..1588: note = MISC_FEATURE - Bipartite nuclear localization sequence
MSEVEFSHEYWMRHALTLAKRARDEREVPVGAVLVLNNRVIGEGWNRAIGLHDPTAHAEIMALRQGGLVMQNYRLIDATLYVTFEPCVMCAGAMIHSRIGRVVFGVRNAKTGAAGSLMDVLHHPGMNHRVEITEGILADECAALLCRFFRMPRRVFNAQKKAQSSTDSGGSSGGSSGSETPGTSESATPESSGGSSGGSDKKYSIGLAIGTNSVGWAVITDEYKVPSKKFKVLGNTDRHSIKKNLIGALLFDSGETAEATRLKRTARRRYTRRKNRICYLQEIFSNEMAKVDDSFFHRLEESFLVEEDKKHERHPIFGNIVDEVAYHEKYPTIYHLRKKLVDSTDKADLRLIYLALAHMIKFRGHFLIEGDLNPDNSDVDKLFIQLVQTYNQLFEENPINASGVDAKAILSARLSKSRRLENLIAQLPGEKKNGLFGNLIALSLGLTPNFKSNFDLAEDAKLQLSKDTYDDDLDNLLAQIGDQYADLFLAAKNLSDAILLSDILRVNTEITKAPLSASMIKRYDEHHQDLTLLKALVRQQLPEKYKEIFFDQSKNGYAGYIDGGASQEEFYKFIKPILEKMDGTEELLVKLNREDLLRKQRTFDNGSIPHQIHLGELHAILRRQEDFYPFLKDNREKIEKILTFRIPYYVGPLARGNSRFAWMTRKSEETITPWNFEEVVDKGASAQSFIERMTNFDKNLPNEKVLPKHSLLYEYFTVYNELTKVKYVTEGMRKPAFLSGEQKKAIVDLLFKTNRKVTVKQLKEDYFKKIECFDSVEISGVEDRFNASLGTYHDLLKIIKDKDFLDNEENEDILEDIVLTLTLFEDREMIEERLKTYAHLFDDKVMKQLKRRRYTGWGRLSRKLINGIRDKQSGKTILDFLKSDGFANRNFMQLIHDDSLTFKEDIQKAQVSGQGDSLHEHIANLAGSPAIKKGILQTVKVVDELVKVMGRHKPENIVIEMARENQTTQKGQKNSRERMKRIEEGIKELGSQILKEHPVENTQLQNEKLYLYYLQNGRDMYVDQELDINRLSDYDVDHIVPQSFLKDDSIDNKVLTRSDKNRGKSDNVPSEEVVKKMKNYWRQLLNAKLITQRKFDNLTKAERGGLSELDKAGFIKRQLVETRQITKHVAQILDSRMNTKYDENDKLIREVKVITLKSKLVSDFRKDFQFYKVREINNYHHAHDAYLNAVVGTALIKKYPKLESEFVYGDYKVYDVRKMIAKSEQEIGKATAKYFFYSNIMNFFKTEITLANGEIRKRPLIETNGETGEIVWDKGRDFATVRKVLSMPQVNIVKKTEVQTGGFSKESILPKRNSDKLIARKKDWDPKKYGGFDSPTVAYSVLVVAKVEKGKSKKLKSVKELLGITIMERSSFEKNPIDFLEAKGYKEVKKDLIIKLPKYSLFELENGRKRMLASAGELQKGNELALPSKYVNFLYLASHYEKLKGSPEDNEQKQLFVEQHKHYLDEIIEQISEFSKRVILADANLDKVLSAYNKHRDKPIREQAENIIHLFTLTNLGAPAAFKYFDTTIDRKRYTSTKEVLDATLIHQSITGLYETRIDLSQLGGDEGADKRTADGSEFESPKKKRKV

SEQ ID NO: 334 - protein, 1786 aa, synthetic construct
  REGION 1..1786: note = ABE8.8-d polypeptide sequence
  REGION 1..167: note = MISC_FEATURE - Adenosine deaminase sequence
  REGION 168..199: note = MISC_FEATURE - Linker sequence
  REGION 200..365: note = MISC_FEATURE - Adenosine deaminase sequence
  REGION 366..397: note = MISC_FEATURE - Linker sequence
  REGION 398..1764: note = MISC_FEATURE - Sequence derived from Cas9
  REGION 1765..1786: note = MISC_FEATURE - Bipartite nuclear localization sequence
MSEVEFSHEYWMRHALTLAKRAWDEREVPVGAVLVHNNRVIGEGWNRPIGRHDPTAHAEIMALRQGGLVMQNYRLIDATLYVTLEPCVMCAGAMIHSRIGRVVFGARDAKTGAAGSLMDVLHHPGMNHRVEITEGILADECAALLSDFFRMRRQEIKAQKKAQSSTDSGGSSGGSSGSETPGTSESATPESSGGSSGGSSEVEFSHEYWMRHALTLAKRARDEREVPVGAVLVLNNRVIGEGWNRAIGLHDPTAHAEIMALRQGGLVMQNYRLIDATLYVTFEPCVMCAGAMIHSRIGRVVFGVRNAKTGAAGSLMDVLHHPGMNHRVEITEGILADECAALLCRFFRMPRRVFNAQKKAQSSTDSGGSSGGSSGSETPGTSESATPESSGGSSGGSDKKYSIGLAIGTNSVGWAVITDEYKVPSKKFKVLGNTDRHSIKKNLIGALLFDSGETAEATRLKRTARRRYTRRKNRICYLQEIFSNEMAKVDDSFFHRLEESFLVEEDKKHERHPIFGNIVDEVAYHEKYPTIYHLRKKLVDSTDKADLRLIYLALAHMIKFRGHFLIEGDLNPDNSDVDKLFIQLVQTYNQLFEENPINASGVDAKAILSARLSKSRRLENLIAQLPGEKKNGLFGNLIALSLGLTPNFKSNFDLAEDAKLQLSKDTYDDDLDNLLAQIGDQYADLFLAAKNLSDAILLSDILRVNTEITKAPLSASMIKRYDEHHQDLTLLKALVRQQLPEKYKEIFFDQSKNGYAGYIDGGASQEEFYKFIKPILEKMDGTEELLVKLNREDLLRKQRTFDNGSIPHQIHLGELHAILRRQEDFYPFLKDNREKIEKILTFRIPYYVGPLARGNSRFAWMTRKSEETITPWNFEEVVDKGASAQSFIERMTNFDKNLPNEKVLPKHSLLYEYFTVYNELTKVKYVTEGMRKPAFLSGEQKKAIVDLLFKTNRKVTVKQLKEDYFKKIECFDSVEISGVEDRFNASLGTYHDLLKIIKDKDFLDNEENEDILEDIVLTLTLFEDREMIEERLKTYAHLFDDKVMKQLKRRRYTGWGRLSRKLINGIRDKQSGKTILDFLKSDGFANRNFMQLIHDDSLTFKEDIQKAQVSGQGDSLHEHIANLAGSPAIKKGILQTVKVVDELVKVMGRHKPENIVIEMARENQTTQKGQKNSRERMKRIEEGIKELGSQILKEHPVENTQLQNEKLYLYYLQNGRDMYVDQELDINRLSDYDVDHIVPQSFLKDDSIDNKVLTRSDKNRGKSDNVPSEEVVKKMKNYWRQLLNAKLITQRKFDNLTKAERGGLSELDKAGFIKRQLVETRQITKHVAQILDSRMNTKYDENDKLIREVKVITLKSKLVSDFRKDFQFYKVREINNYHHAHDAYLNAVVGTALIKKYPKLESEFVYGDYKVYDVRKMIAKSEQEIGKATAKYFFYSNIMNFFKTEITLANGEIRKRPLIETNGETGEIVWDKGRDFATVRKVLSMPQVNIVKKTEVQTGGFSKESILPKRNSDKLIARKKDWDPKKYGGFDSPTVAYSVLVVAKVEKGKSKKLKSVKELLGITIMERSSFEKNPIDFLEAKGYKEVKKDLIIKLPKYSLFELENGRKRMLASAGELQKGNELALPSKYVNFLYLASHYEKLKGSPEDNEQKQLFVEQHKHYLDEIIEQISEFSKRVILADANLDKVLSAYNKHRDKPIREQAENIIHLFTLTNLGAPAAFKYFDTTIDRKRYTSTKEVLDATLIHQSITGLYETRIDLSQLGGDEGADKRTADGSEFESPKKKRKV

SEQ ID NO: 335 - protein, 1588 aa, synthetic construct
  REGION 1..1588: note = ABE8.13-m polypeptide sequence
  REGION 1..167: note = MISC_FEATURE - Adenosine deaminase sequence
  REGION 168..199: note = MISC_FEATURE - Linker sequence
  REGION 200..1566: note = MISC_FEATURE - Sequence derived from Cas9
  REGION 1567..1588: note = MISC_FEATURE - Bipartite nuclear localization sequence
MSEVEFSHEYWMRHALTLAKRARDEREVPVGAVLVLNNRVIGEGWNRAIGLHDPTAHAEIMALRQGGLVMQNYRLYDATLYVTFEPCVMCAGAMIHSRIGRVVFGVRNAKTGAAGSLMDVLHHPGMNHRVEITEGILADECAALLCRFFRMPRRVFNAQKKAQSSTDSGGSSGGSSGSETPGTSESATPESSGGSSGGSDKKYSIGLAIGTNSVGWAVITDEYKVPSKKFKVLGNTDRHSIKKNLIGALLFDSGETAEATRLKRTARRRYTRRKNRICYLQEIFSNEMAKVDDSFFHRLEESFLVEEDKKHERHPIFGNIVDEVAYHEKYPTIYHLRKKLVDSTDKADLRLIYLALAHMIKFRGHFLIEGDLNPDNSDVDKLFIQLVQTYNQLFEENPINASGVDAKAILSARLSKSRRLENLIAQLPGEKKNGLFGNLIALSLGLTPNFKSNFDLAEDAKLQLSKDTYDDDLDNLLAQIGDQYADLFLAAKNLSDAILLSDILRVNTEITKAPLSASMIKRYDEHHQDLTLLKALVRQQLPEKYKEIFFDQSKNGYAGYIDGGASQEEFYKFIKPILEKMDGTEELLVKLNREDLLRKQRTFDNGSIPHQIHLGELHAILRRQEDFYPFLKDNREKIEKILTFRIPYYVGPLARGNSRFAWMTRKSEETITPWNFEEVVDKGASAQSFIERMTNFDKNLPNEKVLPKHSLLYEYFTVYNELTKVKYVTEGMRKPAFLSGEQKKAIVDLLFKTNRKVTVKQLKEDYFKKIECFDSVEISGVEDRFNASLGTYHDLLKIIKDKDFLDNEENEDILEDIVLTLTLFEDREMIEERLKTYAHLFDDKVMKQLKRRRYTGWGRLSRKLINGIRDKQSGKTILDFLKSDGFANRNFMQLIHDDSLTFKEDIQKAQVSGQGDSLHEHIANLAGSPAIKKGILQTVKVVDELVKVMGRHKPENIVIEMARENQTTQKGQKNSRERMKRIEEGIKELGSQILKEHPVENTQLQNEKLYLYYLQNGRDMYVDQELDINRLSDYDVDHIVPQSFLKDDSIDNKVLTRSDKNRGKSDNVPSEEVVKKMKNYWRQLLNAKLITQRKFDNLTKAERGGLSELDKAGFIKRQLVETRQITKHVAQILDSRMNTKYDENDKLIREVKVITLKSKLVSDFRKDFQFYKVREINNYHHAHDAYLNAVVGTALIKKYPKLESEFVYGDYKVYDVRKMIAKSEQEIGKATAKYFFYSNIMNFFKTEITLANGEIRKRPLIETNGETGEIVWDKGRDFATVRKVLSMPQVNIVKKTEVQTGGFSKESILPKRNSDKLIARKKDWDPKKYGGFDSPTVAYSVLVVAKVEKGKSKKLKSVKELLGITIMERSSFEKNPIDFLEAKGYKEVKKDLIIKLPKYSLFELENGRKRMLASAGELQKGNELALPSKYVNFLYLASHYEKLKGSPEDNEQKQLFVEQHKHYLDEIIEQISEFSKRVILADANLDKVLSAYNKHRDKPIREQAENIIHLFTLTNLGAPAAFKYFDTTIDRKRYTSTKEVLDATLIHQSITGLYETRIDLSQLGGDEGADKRTADGSEFESPKKKRKV

SEQ ID NO: 336 - protein, 1786 aa, synthetic construct
  REGION 1..1786: note = ABE8.13-d polypeptide sequence
  REGION 1..167: note = MISC_FEATURE - Adenosine deaminase sequence
  REGION 168..199: note = MISC_FEATURE - Linker sequence
  REGION 200..365: note = MISC_FEATURE - Adenosine deaminase sequence
  REGION 366..397: note = MISC_FEATURE - Linker sequence
  REGION 398..1764: note = MISC_FEATURE - Sequence derived from Cas9
  REGION 1765..1786: note = MISC_FEATURE - Bipartite nuclear localization sequence
MSEVEFSHEYWMRHALTLAKRAWDEREVPVGAVLVHNNRVIGEGWNRPIGRHDPTAHAEIMALRQGGLVMQNYRLIDATLYVTLEPCVMCAGAMIHSRIGRVVFGARDAKTGAAGSLMDVLHHPGMNHRVEITEGILADECAALLSDFFRMRRQEIKAQKKAQSSTDSGGSSGGSSGSETPGTSESATPESSGGSSGGSSEVEFSHEYWMRHALTLAKRARDEREVPVGAVLVLNNRVIGEGWNRAIGLHDPTAHAEIMALRQGGLVMQNYRLYDATLYVTFEPCVMCAGAMIHSRIGRVVFGVRNAKTGAAGSLMDVLHHPGMNHRVEITEGILADECAALLCRFFRMPRRVFNAQKKAQSSTDSGGSSGGSSGSETPGTSESATPESSGGSSGGSDKKYSIGLAIGTNSVGWAVITDEYKVPSKKFKVLGNTDRHSIKKNLIGALLFDSGETAEATRLKRTARRRYTRRKNRICYLQEIFSNEMAKVDDSFFHRLEESFLVEEDKKHERHPIFGNIVDEVAYHEKYPTIYHLRKKLVDSTDKADLRLIYLALAHMIKFRGHFLIEGDLNPDNSDVDKLFIQLVQTYNQLFEENPINASGVDAKAILSARLSKSRRLENLIAQLPGEKKNGLFGNLIALSLGLTPNFKSNFDLAEDAKLQLSKDTYDDDLDNLLAQIGDQYADLFLAAKNLSDAILLSDILRVNTEITKAPLSASMIKRYDEHHQDLTLLKALVRQQLPEKYKEIFFDQSKNGYAGYIDGGASQEEFYKFIKPILEKMDGTEELLVKLNREDLLRKQRTFDNGSIPHQIHLGELHAILRRQEDFYPFLKDNREKIEKILTFRIPYYVGPLARGNSRFAWMTRKSEETITPWNFEEVVDKGASAQSFIERMTNFDKNLPNEKVLPKHSLLYEYFTVYNELTKVKYVTEGMRKPAFLSGEQKKAIVDLLFKTNRKVTVKQLKEDYFKKIECFDSVEISGVEDRFNASLGTYHDLLKIIKDKDFLDNEENEDILEDIVLTLTLFEDREMIEERLKTYAHLFDDKVMKQLKRRRYTGWGRLSRKLINGIRDKQSGKTILDFLKSDGFANRNFMQLIHDDSLTFKEDIQKAQVSGQGDSLHEHIANLAGSPAIKKGILQTVKVVDELVKVMGRHKPENIVIEMARENQTTQKGQKNSRERMKRIEEGIKELGSQILKEHPVENTQLQNEKLYLYYLQNGRDMYVDQELDINRLSDYDVDHIVPQSFLKDDSIDNKVLTRSDKNRGKSDNVPSEEVVKKMKNYWRQLLNAKLITQRKFDNLTKAERGGLSELDKAGFIKRQLVETRQITKHVAQILDSRMNTKYDENDKLIREVKVITLKSKLVSDFRKDFQFYKVREINNYHHAHDAYLNAVVGTALIKKYPKLESEFVYGDYKVYDVRKMIAKSEQEIGKATAKYFFYSNIMNFFKTEITLANGEIRKRPLIETNGETGEIVWDKGRDFATVRKVLSMPQVNIVKKTEVQTGGFSKESILPKRNSDKLIARKKDWDPKKYGGFDSPTVAYSVLVVAKVEKGKSKKLKSVKELLGITIMERSSFEKNPIDFLEAKGYKEVKKDLIIKLPKYSLFELENGRKRMLASAGELQKGNELALPSKYVNFLYLASHYEKLKGSPEDNEQKQLFVEQHKHYLDEIIEQISEFSKRVILADANLDKVLSAYNKHRDKPIREQAENIIHLFTLTNLGAPAAFKYFDTTIDRKRYTSTKEVLDATLIHQSITGLYETRIDLSQLGGDEGADKRTADGSEFESPKKKRKV

SEQ ID NO: 337 - protein, 1588 aa, synthetic construct
  REGION 1..1588: note = ABE8.17-m polypeptide sequence
  REGION 1..167: note = MISC_FEATURE - Adenosine deaminase sequence
  REGION 168..199: note = MISC_FEATURE - Linker sequence
  REGION 200..1566: note = MISC_FEATURE - Sequence derived from Cas9
  REGION 1567..1588: note = MISC_FEATURE - Bipartite nuclear localization sequence
MSEVEFSHEYWMRHALTLAKRARDEREVPVGAVLVLNNRVIGEGWNRAIGLHDPTAHAEIMALRQGGLVMQNYRLIDATLYSTFEPCVMCAGAMIHSRIGRVVFGVRNAKTGAAGSLMDVLHYPGMNHRVEITEGILADECAALLCYFFRMPRRVFNAQKKAQSSTDSGGSSGGSSGSETPGTSESATPESSGGSSGGSDKKYSIGLAIGTNSVGWAVITDEYKVPSKKFKVLGNTDRHSIKKNLIGALLFDSGETAEATRLKRTARRRYTRRKNRICYLQEIFSNEMAKVDDSFFHRLEESFLVEEDKKHERHPIFGNIVDEVAYHEKYPTIYHLRKKLVDSTDKADLRLIYLALAHMIKFRGHFLIEGDLNPDNSDVDKLFIQLVQTYNQLFEENPINASGVDAKAILSARLSKSRRLENLIAQLPGEKKNGLFGNLIALSLGLTPNFKSNFDLAEDAKLQLSKDTYDDDLDNLLAQIGDQYADLFLAAKNLSDAILLSDILRVNTEITKAPLSASMIKRYDEHHQDLTLLKALVRQQLPEKYKEIFFDQSKNGYAGYIDGGASQEEFYKFIKPILEKMDGTEELLVKLNREDLLRKQRTFDNGSIPHQIHLGELHAILRRQEDFYPFLKDNREKIEKILTFRIPYYVGPLARGNSRFAWMTRKSEETITPWNFEEVVDKGASAQSFIERMTNFDKNLPNEKVLPKHSLLYEYFTVYNELTKVKYVTEGMRKPAFLSGEQKKAIVDLLFKTNRKVTVKQLKEDYFKKIECFDSVEISGVEDRFNASLGTYHDLLKIIKDKDFLDNEENEDILEDIVLTLTLFEDREMIEERLKTYAHLFDDKVMKQLKRRRYTGWGRLSRKLINGIRDKQSGKTILDFLKSDGFANRNFMQLIHDDSLTFKEDIQKAQVSGQGDSLHEHIANLAGSPAIKKGILQTVKVVDELVKVMGRHKPENIVIEMARENQTTQKGQKNSRERMKRIEEGIKELGSQILKEHPVENTQLQNEKLYLYYLQNGRDMYVDQELDINRLSDYDVDHIVPQSFLKDDSIDNKVLTRSDKNRGKSDNVPSEEVVKKMKNYWRQLLNAKLITQRKFDNLTKAERGGLSELDKAGFIKRQLVETRQITKHVAQILDSRMNTKYDENDKLIREVKVITLKSKLVSDFRKDFQFYKVREINNYHHAHDAYLNAVVGTALIKKYPKLESEFVYGDYKVYDVRKMIAKSEQEIGKATAKYFFYSNIMNFFKTEITLANGEIRKRPLIETNGETGEIVWDKGRDFATVRKVLSMPQVNIVKKTEVQTGGFSKESILPKRNSDKLIARKKDWDPKKYGGFDSPTVAYSVLVVAKVEKGKSKKLKSVKELLGITIMERSSFEKNPIDFLEAKGYKEVKKDLIIKLPKYSLFELENGRKRMLASAGELQKGNELALPSKYVNFLYLASHYEKLKGSPEDNEQKQLFVEQHKHYLDEIIEQISEFSKRVILADANLDKVLSAYNKHRDKPIREQAENIIHLFTLTNLGAPAAFKYFDTTIDRKRYTSTKEVLDATLIHQSITGLYETRIDLSQLGGDEGADKRTADGSEFESPKKKRKV

SEQ ID NO: 338 - protein, 1786 aa, synthetic construct
  REGION 1..1786: note = ABE8.17-d polypeptide sequence
  REGION 1..167: note = MISC_FEATURE - Adenosine deaminase sequence
  REGION 168..199: note = MISC_FEATURE - Linker sequence
  REGION 200..365: note = MISC_FEATURE - Adenosine deaminase sequence
  REGION 366..397: note = MISC_FEATURE - Linker sequence
  REGION 398..1764: note = MISC_FEATURE - Sequence derived from Cas9
  REGION 1765..1786: note = MISC_FEATURE - Bipartite nuclear localization sequence
MSEVEFSHEYWMRHALTLAKRAWDEREVPVGAVLVHNNRVIGEGWNRPIGRHDPTAHAEIMALRQGGLVMQNYRLIDATLYVTLEPCVMCAGAMIHSRIGRVVFGARDAKTGAAGSLMDVLHHPGMNHRVEITEGILADECAALLSDFFRMRRQEIKAQKKAQSSTDSGGSSGGSSGSETPGTSESATPESSGGSSGGSSEVEFSHEYWMRHALTLAKRARDEREVPVGAVLVLNNRVIGEGWNRAIGLHDPTAHAEIMALRQGGLVMQNYRLIDATLYSTFEPCVMCAGAMIHSRIGRVVFGVRNAKTGAAGSLMDVLHYPGMNHRVEITEGILADECAALLCYFFRMPRRVFNAQKKAQSSTDSGGSSGGSSGSETPGTSESATPESSGGSSGGSDKKYSIGLAIGTNSVGWAVITDEYKVPSKKFKVLGNTDRHSIKKNLIGALLFDSGETAEATRLKRTARRRYTRRKNRICYLQEIFSNEMAKVDDSFFHRLEESFLVEEDKKHERHPIFGNIVDEVAYHEKYPTIYHLRKKLVDSTDKADLRLIYLALAHMIKFRGHFLIEGDLNPDNSDVDKLFIQLVQTYNQLFEENPINASGVDAKAILSARLSKSRRLENLIAQLPGEKKNGLFGNLIALSLGLTPNFKSNFDLAEDAKLQLSKDTYDDDLDNLLAQIGDQYADLFLAAKNLSDAILLSDILRVNTEITKAPLSASMIKRYDEHHQDLTLLKALVRQQLPEKYKEIFFDQSKNGYAGYIDGGASQEEFYKFIKPILEKMDGTEELLVKLNREDLLRKQRTFDNGSIPHQIHLGELHAILRRQEDFYPFLKDNREKIEKILTFRIPYYVGPLARGNSRFAWMTRKSEETITPWNFEEVVDKGASAQSFIERMTNFDKNLPNEKVLPKHSLLYEYFTVYNELTKVKYVTEGMRKPAFLSGEQKKAIVDLLFKTNRKVTVKQLKEDYFKKIECFDSVEISGVEDRFNASLGTYHDLLKIIKDKDFLDNEENEDILEDIVLTLTLFEDREMIEERLKTYAHLFDDKVMKQLKRRRYTGWGRLSRKLINGIRDKQSGKTILDFLKSDGFANRNFMQLIHDDSLTFKEDIQKAQVSGQGDSLHEHIANLAGSPAIKKGILQTVKVVDELVKVMGRHKPENIVIEMARENQTTQKGQKNSRERMKRIEEGIKELGSQILKEHPVENTQLQNEKLYLYYLQNGRDMYVDQELDINRLSDYDVDHIVPQSFLKDDSIDNKVLTRSDKNRGKSDNVPSEEVVKKMKNYWRQLLNAKLITQRKFDNLTKAERGGLSELDKAGFIKRQLVETRQITKHVAQILDSRMNTKYDENDKLIREVKVITLKSKLVSDFRKDFQFYKVREINNYHHAHDAYLNAVVGTALIKKYPKLESEFVYGDYKVYDVRKMIAKSEQEIGKATAKYFFYSNIMNFFKTEITLANGEIRKRPLIETNGETGEIVWDKGRDFATVRKVLSMPQVNIVKKTEVQTGGFSKESILPKRNSDKLIARKKDWDPKKYGGFDSPTVAYSVLVVAKVEKGKSKKLKSVKELLGITIMERSSFEKNPIDFLEAKGYKEVKKDLIIKLPKYSLFELENGRKRMLASAGELQKGNELALPSKYVNFLYLASHYEKLKGSPEDNEQKQLFVEQHKHYLDEIIEQISEFSKRVILADANLDKVLSAYNKHRDKPIREQAENIIHLFTLTNLGAPAAFKYFDTTIDRKRYTSTKEVLDATLIHQSITGLYETRIDLSQLGGDEGADKRTADGSEFESPKKKRKV

SEQ ID NO: 339 - protein, 1588 aa, synthetic construct
  REGION 1..1588: note = ABE8.20-m polypeptide sequence
  REGION 1..167: note = MISC_FEATURE - Adenosine deaminase sequence
  REGION 168..199: note = MISC_FEATURE - Linker sequence
  REGION 200..1566: note = MISC_FEATURE - Sequence derived from Cas9
  REGION 1567..1588: note = MISC_FEATURE - Bipartite nuclear localization sequence
MSEVEFSHEYWMRHALTLAKRARDEREVPVGAVLVLNNRVIGEGWNRAIGLHDPTAHAEIMALRQGGLVMQNYRLYDATLYSTFEPCVMCAGAMIHSRIGRVVFGVRNAKTGAAGSLMDVLHHPGMNHRVEITEGILADECAALLCRFFRMPRRVFNAQKKAQSSTDSGGSSGGSSGSETPGTSESATPESSGGSSGGSDKKYSIGLAIGTNSVGWAVITDEYKVPSKKFKVLGNTDRHSIKKNLIGALLFDSGETAEATRLKRTARRRYTRRKNRICYLQEIFSNEMAKVDDSFFHRLEESFLVEEDKKHERHPIFGNIVDEVAYHEKYPTIYHLRKKLVDSTDKADLRLIYLALAHMIKFRGHFLIEGDLNPDNSDVDKLFIQLVQTYNQLFEENPINASGVDAKAILSARLSKSRRLENLIAQLPGEKKNGLFGNLIALSLGLTPNFKSNFDLAEDAKLQLSKDTYDDDLDNLLAQIGDQYADLFLAAKNLSDAILLSDILRVNTEITKAPLSASMIKRYDEHHQDLTLLKALVRQQLPEKYKEIFFDQSKNGYAGYIDGGASQEEFYKFIKPILEKMDGTEELLVKLNREDLLRKQRTFDNGSIPHQIHLGELHAILRRQEDFYPFLKDNREKIEKILTFRIPYYVGPLARGNSRFAWMTRKSEETITPWNFEEVVDKGASAQSFIERMTNFDKNLPNEKVLPKHSLLYEYFTVYNELTKVKYVTEGMRKPAFLSGEQKKAIVDLLFKTNRKVTVKQLKEDYFKKIECFDSVEISGVEDRFNASLGTYHDLLKIIKDKDFLDNEENEDILEDIVLTLTLFEDREMIEERLKTYAHLFDDKVMKQLKRRRYTGWGRLSRKLINGIRDKQSGKTILDFLKSDGFANRNFMQLIHDDSLTFKEDIQKAQVSGQGDSLHEHIANLAGSPAIKKGILQTVKVVDELVKVMGRHKPENIVIEMARENQTTQKGQKNSRERMKRIEEGIKELGSQILKEHPVENTQLQNEKLYLYYLQNGRDMYVDQELDINRLSDYDVDHIVPQSFLKDDSIDNKVLTRSDKNRGKSDNVPSEEVVKKMKNYWRQLLNAKLITQRKFDNLTKAERGGLSELDKAGFIKRQLVETRQITKHVAQILDSRMNTKYDENDKLIREVKVITLKSKLVSDFRKDFQFYKVREINNYHHAHDAYLNAVVGTALIKKYPKLESEFVYGDYKVYDVRKMIAKSEQEIGKATAKYFFYSNIMNFFKTEITLANGEIRKRPLIETNGETGEIVWDKGRDFATVRKVLSMPQVNIVKKTEVQTGGFSKESILPKRNSDKLIARKKDWDPKKYGGFDSPTVAYSVLVVAKVEKGKSKKLKSVKELLGITIMERSSFEKNPIDFLEAKGYKEVKKDLIIKLPKYSLFELENGRKRMLASAGELQKGNELALPSKYVNFLYLASHYEKLKGSPEDNEQKQLFVEQHKHYLDEIIEQISEFSKRVILADANLDKVLSAYNKHRDKPIREQAENIIHLFTLTNLGAPAAFKYFDTTIDRKRYTSTKEVLDATLIHQSITGLYETRIDLSQLGGDEGADKRTADGSEFESPKKKRKV

SEQ ID NO: 340 - protein, 1786 aa, synthetic construct
  REGION 1..1786: note = ABE8.20-d polypeptide sequence
  REGION 1..167: note = MISC_FEATURE - Adenosine deaminase sequence
  REGION 168..199: note = MISC_FEATURE - Linker sequence
  REGION 200..365: note = MISC_FEATURE - Adenosine deaminase sequence
  REGION 366..397: note = MISC_FEATURE - Linker sequence
  REGION 398..1764: note = MISC_FEATURE - Sequence derived from Cas9
  REGION 1765..1786: note = MISC_FEATURE - Bipartite nuclear localization sequence
MSEVEFSHEYWMRHALTLAKRAWDEREVPVGAVLVHNNRVIGEGWNRPIGRHDPTAHAEIMALRQGGLVMQNYRLIDATLYVTLEPCVMCAGAMIHSRIGRVVFGARDAKTGAAGSLMDVLHHPGMNHRVEITEGILADECAALLSDFFRMRRQEIKAQKKAQSSTDSGGSSGGSSGSETPGTSESATPESSGGSSGGSSEVEFSHEYWMRHALTLAKRARDEREVPVGAVLVLNNRVIGEGWNRAIGLHDPTAHAEIMALRQGGLVMQNYRLYDATLYSTFEPCVMCAGAMIHSRIGRVVFGVRNAKTGAAGSLMDVLHHPGMNHRVEITEGILADECAALLCRFFRMPRRVFNAQKKAQSSTDSGGSSGGSSGSETPGTSESATPESSGGSSGGSDKKYSIGLAIGTNSVGWAVITDEYKVPSKKFKVLGNTDRHSIKKNLIGALLFDSGETAEATRLKRTARRRYTRRKNRICYLQEIFSNEMAKVDDSFFHRLEESFLVEEDKKHERHPIFGNIVDEVAYHEKYPTIYHLRKKLVDSTDKADLRLIYLALAHMIKFRGHFLIEGDLNPDNSDVDKLFIQLVQTYNQLFEENPINASGVDAKAILSARLSKSRRLENLIAQLPGEKKNGLFGNLIALSLGLTPNFKSNFDLAEDAKLQLSKDTYDDDLDNLLAQIGDQYADLFLAAKNLSDAILLSDILRVNTEITKAPLSASMIKRYDEHHQDLTLLKALVRQQLPEKYKEIFFDQSKNGYAGYIDGGASQEEFYKFIKPILEKMDGTEELLVKLNREDLLRKQRTFDNGSIPHQIHLGELHAILRRQEDFYPFLKDNREKIEKILTFRIPYYVGPLARGNSRFAWMTRKSEETITPWNFEEVVDKGASAQSFIERMTNFDKNLPNEKVLPKHSLLYEYFTVYNELTKVKYVTEGMRKPAFLSGEQKKAIVDLLFKTNRKVTVKQLKEDYFKKIECFDSVEISGVEDRFNASLGTYHDLLKIIKDKDFLDNEENEDILEDIVLTLTLFEDREMIEERLKTYAHLFDDKVMKQLKRRRYTGWGRLSRKLINGIRDKQSGKTILDFLKSDGFANRNFMQLIHDDSLTFKEDIQKAQVSGQGDSLHEHIANLAGSPAIKKGILQTVKVVDELVKVMGRHKPENIVIEMARENQTTQKGQKNSRERMKRIEEGIKELGSQILKEHPVENTQLQNEKLYLYYLQNGRDMYVDQELDINRLSDYDVDHIVPQSFLKDDSIDNKVLTRSDKNRGKSDNVPSEEVVKKMKNYWRQLLNAKLITQRKFDNLTKAERGGLSELDKAGFIKRQLVETRQITKHVAQILDSRMNTKYDENDKLIREVKVITLKSKLVSDFRKDFQFYKVREINNYHHAHDAYLNAVVGTALIKKYPKLESEFVYGDYKVYDVRKMIAKSEQEIGKATAKYFFYSNIMNFFKTEITLANGEIRKRPLIETNGETGEIVWDKGRDFATVRKVLSMPQVNIVKKTEVQTGGFSKESILPKRNSDKLIARKKDWDPKKYGGFDSPTVAYSVLVVAKVEKGKSKKLKSVKELLGITIMERSSFEKNPIDFLEAKGYKEVKKDLIIKLPKYSLFELENGRKRMLASAGELQKGNELALPSKYVNFLYLASHYEKLKGSPEDNEQKQLFVEQHKHYLDEIIEQISEFSKRVILADANLDKVLSAYNKHRDKPIREQAENIIHLFTLTNLGAPAAFKYFDTTIDRKRYTSTKEVLDATLIHQSITGLYETRIDLSQLGGDEGADKRTADGSEFESPKKKRKV

SEQ ID NO: 341 - protein, 1588 aa, synthetic construct
  REGION 1..1588: note = 01. monoABE8.1_bpNLS + Y147T polypeptide sequence
MSEVEFSHEYWMRHALTLAKRARDEREVPVGAVLVLNNRVIGEGWNRAIGLHDPTAHAEIMALRQGGLVMQNYRLIDATLYVTFEPCVMCAGAMIHSRIGRVVFGVRNAKTGAAGSLMDVLHYPGMNHRVEITEGILADECAALLCTFFRMPRQVFNAQKKAQSSTDSGGSSGGSSGSETPGTSESATPESSGGSSGGSDKKYSIGLAIGTNSVGWAVITDEYKVPSKKFKVLGNTDRHSIKKNLIGALLFDSGETAEATRLKRTARRRYTRRKNRICYLQEIFSNEMAKVDDSFFHRLEESFLVEEDKKHERHPIFGNIVDEVAYHEKYPTIYHLRKKLVDSTDKADLRLIYLALAHMIKFRGHFLIEGDLNPDNSDVDKLFIQLVQTYNQLFEENPINASGVDAKAILSARLSKSRRLENLIAQLPGEKKNGLFGNLIALSLGLTPNFKSNFDLAEDAKLQLSKDTYDDDLDNLLAQIGDQYADLFLAAKNLSDAILLSDILRVNTEITKAPLSASMIKRYDEHHQDLTLLKALVRQQLPEKYKEIFFDQSKNGYAGYIDGGASQEEFYKFIKPILEKMDGTEELLVKLNREDLLRKQRTFDNGSIPHQIHLGELHAILRRQEDFYPFLKDNREKIEKILTFRIPYYVGPLARGNSRFAWMTRKSEETITPWNFEEVVDKGASAQSFIERMTNFDKNLPNEKVLPKHSLLYEYFTVYNELTKVKYVTEGMRKPAFLSGEQKKAIVDLLFKTNRKVTVKQLKEDYFKKIECFDSVEISGVEDRFNASLGTYHDLLKIIKDKDFLDNEENEDILEDIVLTLTLFEDREMIEERLKTYAHLFDDKVMKQLKRRRYTGWGRLSRKLINGIRDKQSGKTILDFLKSDGFANRNFMQLIHDDSLTFKEDIQKAQVSGQGDSLHEHIANLAGSPAIKKGILQTVKVVDELVKVMGRHKPENIVIEMARENQTTQKGQKNSRERMKRIEEGIKELGSQILKEHPVENTQLQNEKLYLYYLQNGRDMYVDQELDINRLSDYDVDHIVPQSFLKDDSIDNKVLTRSDKNRGKSDNVPSEEVVKKMKNYWRQLLNAKLITQRKFDNLTKAERGGLSELDKAGFIKRQLVETRQITKHVAQILDSRMNTKYDENDKLIREVKVITLKSKLVSDFRKDFQFYKVREINNYHHAHDAYLNAVVGTALIKKYPKLESEFVYGDYKVYDVRKMIAKSEQEIGKATAKYFFYSNIMNFFKTEITLANGEIRKRPLIETNGETGEIVWDKGRDFATVRKVLSMPQVNIVKKTEVQTGGFSKESILPKRNSDKLIARKKDWDPKKYGGFVSPTVAYSVLVVAKVEKGKSKKLKSVKELLGITIMERSSFEKNPIDFLEAKGYKEVKKDLIIKLPKYSLFELENGRKRMLASARELQKGNELALPSKYVNFLYLASHYEKLKGSPEDNEQKQLFVEQHKHYLDEIIEQISEFSKRVILADANLDKVLSAYNKHRDKPIREQAENIIHLFTLTNLGAPAAFKYFDTTIDRKQYRSTKEVLDATLIHQSITGLYETRIDLSQLGGDEGADKRTADGSEFESPKKKRKV

SEQ ID NO: 342 - protein, 1588 aa, synthetic construct
  REGION 1..1588: note = 02. monoABE8.1_bpNLS + Y147R polypeptide sequence
MSEVEFSHEYWMRHALTLAKRARDEREVPVGAVLVLNNRVIGEGWNRAIGLHDPTAHAEIMALRQGGLVMQNYRLIDATLYVTFEPCVMCAGAMIHSRIGRVVFGVRNAKTGAAGSLMDVLHYPGMNHRVEITEGILADECAALLCRFFRMPRQVFNAQKKAQSSTDSGGSSGGSSGSETPGTSESATPESSGGSSGGSDKKYSIGLAIGTNSVGWAVITDEYKVPSKKFKVLGNTDRHSIKKNLIGALLFDSGETAEATRLKRTARRRYTRRKNRICYLQEIFSNEMAKVDDSFFHRLEESFLVEEDKKHERHPIFGNIVDEVAYHEKYPTIYHLRKKLVDSTDKADLRLIYLALAHMIKFRGHFLIEGDLNPDNSDVDKLFIQLVQTYNQLFEENPINASGVDAKAILSARLSKSRRLENLIAQLPGEKKNGLFGNLIALSLGLTPNFKSNFDLAEDAKLQLSKDTYDDDLDNLLAQIGDQYADLFLAAKNLSDAILLSDILRVNTEITKAPLSASMIKRYDEHHQDLTLLKALVRQQLPEKYKEIFFDQSKNGYAGYIDGGASQEEFYKFIKPILEKMDGTEELLVKLNREDLLRKQRTFDNGSIPHQIHLGELHAILRRQEDFYPFLKDNREKIEKILTFRIPYYVGPLARGNSRFAWMTRKSEETITPWNFEEVVDKGASAQSFIERMTNFDKNLPNEKVLPKHSLLYEYFTVYNELTKVKYVTEGMRKPAFLSGEQKKAIVDLLFKTNRKVTVKQLKEDYFKKIECFDSVEISGVEDRFNASLGTYHDLLKIIKDKDFLDNEENEDILEDIVLTLTLFEDREMIEERLKTYAHLFDDKVMKQLKRRRYTGWGRLSRKLINGIRDKQSGKTILDFLKSDGFANRNFMQLIHDDSLTFKEDIQKAQVSGQGDSLHEHIANLAGSPAIKKGILQTVKVVDELVKVMGRHKPENIVIEMARENQTTQKGQKNSRERMKRIEEGIKELGSQILKEHPVENTQLQNEKLYLYYLQNGRDMYVDQELDINRLSDYDVDHIVPQSFLKDDSIDNKVLTRSDKNRGKSDNVPSEEVVKKMKNYWRQLLNAKLITQRKFDNLTKAERGGLSELDKAGFIKRQLVETRQITKHVAQILDSRMNTKYDENDKLIREVKVITLKSKLVSDFRKDFQFYKVREINNYHHAHDAYLNAVVGTALIKKYPKLESEFVYGDYKVYDVRKMIAKSEQEIGKATAKYFFYSNIMNFFKTEITLANGEIRKRPLIETNGETGEIVWDKGRDFATVRKVLSMPQVNIVKKTEVQTGGFSKESILPKRNSDKLIARKKDWDPKKYGGFVSPTVAYSVLVVAKVEKGKSKKLKSVKELLGITIMERSSFEKNPIDFLEAKGYKEVKKDLIIKLPKYSLFELENGRKRMLASARELQKGNELALPSKYVNFLYLASHYEKLKGSPEDNEQKQLFVEQHKHYLDEIIEQISEFSKRVILADANLDKVLSAYNKHRDKPIREQAENIIHLFTLTNLGAPAAFKYFDTTIDRKQYRSTKEVLDATLIHQSITGLYETRIDLSQLGGDEGADKRTADGSEFESPKKKRKV

SEQ ID NO: 343 - protein, 1588 aa, synthetic construct
  REGION 1..1588: note = 03. monoABE8.1_bpNLS + Q154S polypeptide sequence
MSEVEFSHEYWMRHALTLAKRARDEREVPVGAVLVLNNRVIGEGWNRAIGLHDPTAHAEIMALRQGGLVMQNYRLIDATLYVTFEPCVMCAGAMIHSRIGRVVFGVRNAKTGAAGSLMDVLHYPGMNHRVEITEGILADECAALLCYFFRMPRSVFNAQKKAQSSTDSGGSSGGSSGSETPGTSESATPESSGGSSGGSDKKYSIGLAIGTNSVGWAVITDEYKVPSKKFKVLGNTDRHSIKKNLIGALLFDSGETAEATRLKRTARRRYTRRKNRICYLQEIFSNEMAKVDDSFFHRLEESFLVEEDKKHERHPIFGNIVDEVAYHEKYPTIYHLRKKLVDSTDKADLRLIYLALAHMIKFRGHFLIEGDLNPDNSDVDKLFIQLVQTYNQLFEENPINASGVDAKAILSARLSKSRRLENLIAQLPGEKKNGLFGNLIALSLGLTPNFKSNFDLAEDAKLQLSKDTYDDDLDNLLAQIGDQYADLFLAAKNLSDAILLSDILRVNTEITKAPLSASMIKRYDEHHQDLTLLKALVRQQLPEKYKEIFFDQSKNGYAGYIDGGASQEEFYKFIKPILEKMDGTEELLVKLNREDLLRKQRTFDNGSIPHQIHLGELHAILRRQEDFYPFLKDNREKIEKILTFRIPYYVGPLARGNSRFAWMTRKSEETITPWNFEEVVDKGASAQSFIERMTNFDKNLPNEKVLPKHSLLYEYFTVYNELTKVKYVTEGMRKPAFLSGEQKKAIVDLLFKTNRKVTVKQLKEDYFKKIECFDSVEISGVEDRFNASLGTYHDLLKIIKDKDFLDNEENEDILEDIVLTLTLFEDREMIEERLKTYAHLFDDKVMKQLKRRRYTGWGRLSRKLINGIRDKQSGKTILDFLKSDGFANRNFMQLIHDDSLTFKEDIQKAQVSGQGDSLHEHIANLAGSPAIKKGILQTVKVVDELVKVMGRHKPENIVIEMARENQTTQKGQKNSRERMKRIEEGIKELGSQILKEHPVENTQLQNEKLYLYYLQNGRDMYVDQELDINRLSDYDVDHIVPQSFLKDDSIDNKVLTRSDKNRGKSDNVPSEEVVKKMKNYWRQLLNAKLITQRKFDNLTKAERGGLSELDKAGFIKRQLVETRQITKHVAQILDSRMNTKYDENDKLIREVKVITLKSKLVSDFRKDFQFYKVREINNYHHAHDAYLNAVVGTALIKKYPKLESEFVYGDYKVYDVRKMIAKSEQEIGKATAKYFFYSNIMNFFKTEITLANGEIRKRPLIETNGETGEIVWDKGRDFATVRKVLSMPQVNIVKKTEVQTGGFSKESILPKRNSDKLIARKKDWDPKKYGGFVSPTVAYSVLVVAKVEKGKSKKLKSVKELLGITIMERSSFEKNPIDFLEAKGYKEVKKDLIIKLPKYSLFELENGRKRMLASARELQKGNELALPSKYVNFLYLASHYEKLKGSPEDNEQKQLFVEQHKHYLDEIIEQISEFSKRVILADANLDKVLSAYNKHRDKPIREQAENIIHLFTLTNLGAPAAFKYFDTTIDRKQYRSTKEVLDATLIHQSITGLYETRIDLSQLGGDEGADKRTADGSEFESPKKKRKV

SEQ ID NO: 344 - protein, 1588 aa, synthetic construct
  REGION 1..1588: note = 04. monoABE8.1_bpNLS + Y123H polypeptide sequence
MSEVEFSHEYWMRHALTLAKRARDEREVPVGAVLVLNNRVIGEGWNRAIGLHDPTAHAEIMALRQGGLVMQNYRLIDATLYVTFEPCVMCAGAMIHSRIGRVVFGVRNAKTGAAGSLMDVLHHPGMNHRVEITEGILADECAALLCYFFRMPRQVFNAQKKAQSSTDSGGSSGGSSGSETPGTSESATPESSGGSSGGSDKKYSIGLAIGTNSVGWAVITDEYKVPSKKFKVLGNTDRHSIKKNLIGALLFDSGETAEATRLKRTARRRYTRRKNRICYLQEIFSNEMAKVDDSFFHRLEESFLVEEDKKHERHPIFGNIVDEVAYHEKYPTIYHLRKKLVDSTDKADLRLIYLALAHMIKFRGHFLIEGDLNPDNSDVDKLFIQLVQTYNQLFEENPINASGVDAKAILSARLSKSRRLENLIAQLPGEKKNGLFGNLIALSLGLTPNFKSNFDLAEDAKLQLSKDTYDDDLDNLLAQIGDQYADLFLAAKNLSDAILLSDILRVNTEITKAPLSASMIKRYDEHHQDLTLLKALVRQQLPEKYKEIFFDQSKNGYAGYIDGGASQEEFYKFIKPILEKMDGTEELLVKLNREDLLRKQRTFDNGSIPHQIHLGELHAILRRQEDFYPFLKDNREKIEKILTFRIPYYVGPLARGNSRFAWMTRKSEETITPWNFEEVVDKGASAQSFIERMTNFDKNLPNEKVLPKHSLLYEYFTVYNELTKVKYVTEGMRKPAFLSGEQKKAIVDLLFKTNRKVTVKQLKEDYFKKIECFDSVEISGVEDRFNASLGTYHDLLKIIKDKDFLDNEENEDILEDIVLTLTLFEDREMIEERLKTYAHLFDDKVMKQLKRRRYTGWGRLSRKLINGIRDKQSGKTILDFLKSDGFANRNFMQLIHDDSLTFKEDIQKAQVSGQGDSLHEHIANLAGSPAIKKGILQTVKVVDELVKVMGRHKPENIVIEMARENQTTQKGQKNSRERMKRIEEGIKELGSQILKEHPVENTQLQNEKLYLYYLQNGRDMYVDQELDINRLSDYDVDHIVPQSFLKDDSIDNKVLTRSDKNRGKSDNVPSEEVVKKMKNYWRQLLNAKLITQRKFDNLTKAERGGLSELDKAGFIKRQLVETRQITKHVAQILDSRMNTKYDENDKLIREVKVITLKSKLVSDFRKDFQFYKVREINNYHHAHDAYLNAVVGTALIKKYPKLESEFVYGDYKVYDVRKMIAKSEQEIGKATAKYFFYSNIMNFFKTEITLANGEIRKRPLIETNGETGEIVWDKGRDFATVRKVLSMPQVNIVKKTEVQTGGFSKESILPKRNSDKLIARKKDWDPKKYGGFVSPTVAYSVLVVAKVEKGKSKKLKSVKELLGITIMERSSFEKNPIDFLEAKGYKEVKKDLIIKLPKYSLFELENGRKRMLASARELQKGNELALPSKYVNFLYLASHYEKLKGSPEDNEQKQLFVEQHKHYLDEIIEQISEFSKRVILADANLDKVLSAYNKHRDKPIREQAENIIHLFTLTNLGAPAAFKYFDTTIDRKQYRSTKEVLDATLIHQSITGLYETRIDLSQLGGDEGADKRTADGSEFESPKKKRKV

SEQ ID NO: 345 - protein, 1588 aa, synthetic construct
  REGION 1..1588: note = 05. monoABE8.1_bpNLS + V82S polypeptide sequence
MSEVEFSHEYWMRHALTLAKRARDEREVPVGAVLVLNNRVIGEGWNRAIGLHDPTAHAEIMALRQGGLVMQNYRLIDATLYSTFEPCVMCAGAMIHSRIGRVVFGVRNAKTGAAGSLMDVLHYPGMNHRVEITEGILADECAALLCYFFRMPRQVFNAQKKAQSSTDSGGSSGGSSGSETPGTSESATPESSGGSSGGSDKKYSIGLAIGTNSVGWAVITDEYKVPSKKFKVLGNTDRHSIKKNLIGALLFDSGETAEATRLKRTARRRYTRRKNRICYLQEIFSNEMAKVDDSFFHRLEESFLVEEDKKHERHPIFGNIVDEVAYHEKYPTIYHLRKKLVDSTDKADLRLIYLALAHMIKFRGHFLIEGDLNPDNSDVDKLFIQLVQTYNQLFEENPINASGVDAKAILSARLSKSRRLENLIAQLPGEKKNGLFGNLIALSLGLTPNFKSNFDLAEDAKLQLSKDTYDDDLDNLLAQIGDQYADLFLAAKNLSDAILLSDILRVNTEITKAPLSASMIKRYDEHHQDLTLLKALVRQQLPEKYKEIFFDQSKNGYAGYIDGGASQEEFYKFIKPILEKMDGTEELLVKLNREDLLRKQRTFDNGSIPHQIHLGELHAILRRQEDFYPFLKDNREKIEKILTFRIPYYVGPLARGNSRFAWMTRKSEETITPWNFEEVVDKGASAQSFIERMTNFDKNLPNEKVLPKHSLLYEYFTVYNELTKVKYVTEGMRKPAFLSGEQKKAIVDLLFKTNRKVTVKQLKEDYFKKIECFDSVEISGVEDRFNASLGTYHDLLKIIKDKDFLDNEENEDILEDIVLTLTLFEDREMIEERLKTYAHLFDDKVMKQLKRRRYTGWGRLSRKLINGIRDKQSGKTILDFLKSDGFANRNFMQLIHDDSLTFKEDIQKAQVSGQGDSLHEHIANLAGSPAIKKGILQTVKVVDELVKVMGRHKPENIVIEMARENQTTQKGQKNSRERMKRIEEGIKELGSQILKEHPVENTQLQNEKLYLYYLQNGRDMYVDQELDINRLSDYDVDHIVPQSFLKDDSIDNKVLTRSDKNRGKSDNVPSEEVVKKMKNYWRQLLNAKLITQRKFDNLTKAERGGLSELDKAGFIKRQLVETRQITKHVAQILDSRMNTKYDENDKLIREVKVITLKSKLVSDFRKDFQFYKVREINNYHHAHDAYLNAVVGTALIKKYPKLESEFVYGDYKVYDVRKMIAKSEQEIGKATAKYFFYSNIMNFFKTEITLANGEIRKRPLIETNGETGEIVWDKGRDFATVRKVLSMPQVNIVKKTEVQTGGFSKESILPKRNSDKLIARKKDWDPKKYGGFVSPTVAYSVLVVAKVEKGKSKKLKSVKELLGITIMERSSFEKNPIDFLEAKGYKEVKKDLIIKLPKYSLFELENGRKRMLASARELQKGNELALPSKYVNFLYLASHYEKLKGSPEDNEQKQLFVEQHKHYLDEIIEQISEFSKRVILADANLDKVLSAYNKHRDKPIREQAENIIHLFTLTNLGAPAAFKYFDTTIDRKQYRSTKEVLDATLIHQSITGLYETRIDLSQLGGDEGADKRTADGSEFESPKKKRKV

SEQ ID NO: 346 - protein, 1588 aa, synthetic construct
  REGION 1..1588: note = 06. monoABE8.1_bpNLS + T166R polypeptide sequence
MSEVEFSHEYWMRHALTLAKRARDEREVPVGAVLVLNNRVIGEGWNRAIGLHDPTAHAEIMALRQGGLVMQNYRLIDATLYVTFEPCVMCAGAMIHSRIGRVVFGVRNAKTGAAGSLMDVLHYPGMNHRVEITEGILADECAALLCYFFRMPRQVFNAQKKAQSSRDSGGSSGGSSGSETPGTSESATPESSGGSSGGSDKKYSIGLAIGTNSVGWAVITDEYKVPSKKFKVLGNTDRHSIKKNLIGALLFDSGETAEATRLKRTARRRYTRRKNRICYLQEIFSNEMAKVDDSFFHRLEESFLVEEDKKHERHPIFGNIVDEVAYHEKYPTIYHLRKKLVDSTDKADLRLIYLALAHMIKFRGHFLIEGDLNPDNSDVDKLFIQLVQTYNQLFEENPINASGVDAKAILSARLSKSRRLENLIAQLPGEKKNGLFGNLIALSLGLTPNFKSNFDLAEDAKLQLSKDTYDDDLDNLLAQIGDQYADLFLAAKNLSDAILLSDILRVNTEITKAPLSASMIKRYDEHHQDLTLLKALVRQQLPEKYKEIFFDQSKNGYAGYIDGGASQEEFYKFIKPILEKMDGTEELLVKLNREDLLRKQRTFDNGSIPHQIHLGELHAILRRQEDFYPFLKDNREKIEKILTFRIPYYVGPLARGNSRFAWMTRKSEETITPWNFEEVVDKGASAQSFIERMTNFDKNLPNEKVLPKHSLLYEYFTVYNELTKVKYVTEGMRKPAFLSGEQKKAIVDLLFKTNRKVTVKQLKEDYFKKIECFDSVEISGVEDRFNASLGTYHDLLKIIKDKDFLDNEENEDILEDIVLTLTLFEDREMIEERLKTYAHLFDDKVMKQLKRRRYTGWGRLSRKLINGIRDKQSGKTILDFLKSDGFANRNFMQLIHDDSLTFKEDIQKAQVSGQGDSLHEHIANLAGSPAIKKGILQTVKVVDELVKVMGRHKPENIVIEMARENQTTQKGQKNSRERMKRIEEGIKELGSQILKEHPVENTQLQNEKLYLYYLQNGRDMYVDQELDINRLSDYDVDHIVPQSFLKDDSIDNKVLTRSDKNRGKSDNVPSEEVVKKMKNYWRQLLNAKLITQRKFDNLTKAERGGLSELDKAGFIKRQLVETRQITKHVAQILDSRMNTKYDENDKLIREVKVITLKSKLVSDFRKDFQFYKVREINNYHHAHDAYLNAVVGTALIKKYPKLESEFVYGDYKVYDVRKMIAKSEQEIGKATAKYFFYSNIMNFFKTEITLANGEIRKRPLIETNGETGEIVWDKGRDFATVRKVLSMPQVNIVKKTEVQTGGFSKESILPKRNSDKLIARKKDWDPKKYGGFVSPTVAYSVLVVAKVEKGKSKKLKSVKELLGITIMERSSFEKNPIDFLEAKGYKEVKKDLIIKLPKYSLFELENGRKRMLASARELQKGNELALPSKYVNFLYLASHYEKLKGSPEDNEQKQLFVEQHKHYLDEIIEQISEFSKRVILADANLDKVLSAYNKHRDKPIREQAENIIHLFTLTNLGAPAAFKYFDTTIDRKQYRSTKEVLDATLIHQSITGLYETRIDLSQLGGDEGADKRTADGSEFESPKKKRKV

SEQ ID NO: 347 - protein, 1588 aa, synthetic construct
  REGION 1..1588: note = 07. monoABE8.1_bpNLS + Q154R polypeptide sequence
MSEVEFSHEYWMRHALTLAKRARDEREVPVGAVLVLNNRVIGEGWNRAIGLHDPTAHAEIMALRQGGLVMQNYRLIDATLYVTFEPCVMCAGAMIHSRIGRVVFGVRNAKTGAAGSLMDVLHYPGMNHRVEITEGILADECAALLCYFFRMPRRVFNAQKKAQSSTDSGGSSGGSSGSETPGTSESATPESSGGSSGGSDKKYSIGLAIGTNSVGWAVITDEYKVPSKKFKVLGNTDRHSIKKNLIGALLFDSGETAEATRLKRTARRRYTRRKNRICYLQEIFSNEMAKVDDSFFHRLEESFLVEEDKKHERHPIFGNIVDEVAYHEKYPTIYHLRKKLVDSTDKADLRLIYLALAHMIKFRGHFLIEGDLNPDNSDVDKLFIQLVQTYNQLFEENPINASGVDAKAILSARLSKSRRLENLIAQLPGEKKNGLFGNLIALSLGLTPNFKSNFDLAEDAKLQLSKDTYDDDLDNLLAQIGDQYADLFLAAKNLSDAILLSDILRVNTEITKAPLSASMIKRYDEHHQDLTLLKALVRQQLPEKYKEIFFDQSKNGYAGYIDGGASQEEFYKFIKPILEKMDGTEELLVKLNREDLLRKQRTFDNGSIPHQIHLGELHAILRRQEDFYPFLKDNREKIEKILTFRIPYYVGPLARGNSRFAWMTRKSEETITPWNFEEVVDKGASAQSFIERMTNFDKNLPNEKVLPKHSLLYEYFTVYNELTKVKYVTEGMRKPAFLSGEQKKAIVDLLFKTNRKVTVKQLKEDYFKKIECFDSVEISGVEDRFNASLGTYHDLLKIIKDKDFLDNEENEDILEDIVLTLTLFEDREMIEERLKTYAHLFDDKVMKQLKRRRYTGWGRLSRKLINGIRDKQSGKTILDFLKSDGFANRNFMQLIHDDSLTFKEDIQKAQVSGQGDSLHEHIANLAGSPAIKKGILQTVKVVDELVKVMGRHKPENIVIEMARENQTTQKGQKNSRERMKRIEEGIKELGSQILKEHPVENTQLQNEKLYLYYLQNGRDMYVDQELDINRLSDYDVDHIVPQSFLKDDSIDNKVLTRSDKNRGKSDNVPSEEVVKKMKNYWRQLLNAKLITQRKFDNLTKAERGGLSELDKAGFIKRQLVETRQITKHVAQILDSRMNTKYDENDKLIREVKVITLKSKLVSDFRKDFQFYKVREINNYHHAHDAYLNAVVGTALIKKYPKLESEFVYGDYKVYDVRKMIAKSEQEIGKATAKYFFYSNIMNFFKTEITLANGEIRKRPLIETNGETGEIVWDKGRDFATVRKVLSMPQVNIVKKTEVQTGGFSKESILPKRNSDKLIARKKDWDPKKYGGFVSPTVAYSVLVVAKVEKGKSKKLKSVKELLGITIMERSSFEKNPIDFLEAKGYKEVKKDLIIKLPKYSLFELENGRKRMLASARELQKGNELALPSKYVNFLYLASHYEKLKGSPEDNEQKQLFVEQHKHYLDEIIEQISEFSKRVILADANLDKVLSAYNKHRDKPIREQAENIIHLFTLTNLGAPAAFKYFDTTIDRKQYRSTKEVLDATLIHQSITGLYETRIDLSQLGGDEGADKRTADGSEFESPKKKRKV

SEQ ID NO: 348 - protein, 1588 aa, synthetic construct
  REGION 1..1588: note = 08. monoABE8.1_bpNLS +Y147R_Q154R_Y123H polypeptide sequence
MSEVEFSHEYWMRHALTLAKRARDEREVPVGAVLVLNNRVIGEGWNRAIGLHDPTAHAEIMALRQGGLVMQNYRLIDATLYVTFEPCVMCAGAMIHSRIGRVVFGVRNAKTGAAGSLMDVLHHPGMNHRVEITEGILADECAALLCRFFRMPRRVFNAQKKAQSSTDSGGSSGGSSGSETPGTSESATPESSGGSSGGSDKKYSIGLAIGTNSVGWAVITDEYKVPSKKFKVLGNTDRHSIKKNLIGALLFDSGETAEATRLKRTARRRYTRRKNRICYLQEIFSNEMAKVDDSFFHRLEESFLVEEDKKHERHPIFGNIVDEVAYHEKYPTIYHLRKKLVDSTDKADLRLIYLALAHMIKFRGHFLIEGDLNPDNSDVDKLFIQLVQTYNQLFEENPINASGVDAKAILSARLSKSRRLENLIAQLPGEKKNGLFGNLIALSLGLTPNFKSNFDLAEDAKLQLSKDTYDDDLDNLLAQIGDQYADLFLAAKNLSDAILLSDILRVNTEITKAPLSASMIKRYDEHHQDLTLLKALVRQQLPEKYKEIFFDQSKNGYAGYIDGGASQEEFYKFIKPILEKMDGTEELLVKLNREDLLRKQRTFDNGSIPHQIHLGELHAILRRQEDFYPFLKDNREKIEKILTFRIPYYVGPLARGNSRFAWMTRKSEETITPWNFEEVVDKGASAQSFIERMTNFDKNLPNEKVLPKHSLLYEYFTVYNELTKVKYVTEGMRKPAFLSGEQKKAIVDLLFKTNRKVTVKQLKEDYFKKIECFDSVEISGVEDRFNASLGTYHDLLKIIKDKDFLDNEENEDILEDIVLTLTLFEDREMIEERLKTYAHLFDDKVMKQLKRRRYTGWGRLSRKLINGIRDKQSGKTILDFLKSDGFANRNFMQLIHDDSLTFKEDIQKAQVSGQGDSLHEHIANLAGSPAIKKGILQTVKVVDELVKVMGRHKPENIVIEMARENQTTQKGQKNSRERMKRIEEGIKELGSQILKEHPVENTQLQNEKLYLYYLQNGRDMYVDQELDINRLSDYDVDHIVPQSFLKDDSIDNKVLTRSDKNRGKSDNVPSEEVVKKMKNYWRQLLNAKLITQRKFDNLTKAERGGLSELDKAGFIKRQLVETRQITKHVAQILDSRMNTKYDENDKLIREVKVITLKSKLVSDFRKDFQFYKVREINNYHHAHDAYLNAVVGTALIKKYPKLESEFVYGDYKVYDVRKMIAKSEQEIGKATAKYFFYSNIMNFFKTEITLANGEIRKRPLIETNGETGEIVWDKGRDFATVRKVLSMPQVNIVKKTEVQTGGFSKESILPKRNSDKLIARKKDWDPKKYGGFVSPTVAYSVLVVAKVEKGKSKKLKSVKELLGITIMERSSFEKNPIDFLEAKGYKEVKKDLIIKLPKYSLFELENGRKRMLASARELQKGNELALPSKYVNFLYLASHYEKLKGSPEDNEQKQLFVEQHKHYLDEIIEQISEFSKRVILADANLDKVLSAYNKHRDKPIREQAENIIHLFTLTNLGAPAAFKYFDTTIDRKQYRSTKEVLDATLIHQSITGLYETRIDLSQLGGDEGADKRTADGSEFESPKKKRKV

SEQ ID NO: 349 - protein, 1588 aa, synthetic construct
  REGION 1..1588: note = 09. monoABE8.1_bpNLS +Y147R_Q154R_I76Y polypeptide sequence
MSEVEFSHEYWMRHALTLAKRARDEREVPVGAVLVLNNRVIGEGWNRAIGLHDPTAHAEIMALRQGGLVMQNYRLYDATLYVTFEPCVMCAGAMIHSRIGRVVFGVRNAKTGAAGSLMDVLHYPGMNHRVEITEGILADECAALLCRFFRMPRRVFNAQKKAQSSTDSGGSSGGSSGSETPGTSESATPESSGGSSGGSDKKYSIGLAIGTNSVGWAVITDEYKVPSKKFKVLGNTDRHSIKKNLIGALLFDSGETAEATRLKRTARRRYTRRKNRICYLQEIFSNEMAKVDDSFFHRLEESFLVEEDKKHERHPIFGNIVDEVAYHEKYPTIYHLRKKLVDSTDKADLRLIYLALAHMIKFRGHFLIEGDLNPDNSDVDKLFIQLVQTYNQLFEENPINASGVDAKAILSARLSKSRRLENLIAQLPGEKKNGLFGNLIALSLGLTPNFKSNFDLAEDAKLQLSKDTYDDDLDNLLAQIGDQYADLFLAAKNLSDAILLSDILRVNTEITKAPLSASMIKRYDEHHQDLTLLKALVRQQLPEKYKEIFFDQSKNGYAGYIDGGASQEEFYKFIKPILEKMDGTEELLVKLNREDLLRKQRTFDNGSIPHQIHLGELHAILRRQEDFYPFLKDNREKIEKILTFRIPYYVGPLARGNSRFAWMTRKSEETITPWNFEEVVDKGASAQSFIERMTNFDKNLPNEKVLPKHSLLYEYFTVYNELTKVKYVTEGMRKPAFLSGEQKKAIVDLLFKTNRKVTVKQLKEDYFKKIECFDSVEISGVEDRFNASLGTYHDLLKIIKDKDFLDNEENEDILEDIVLTLTLFEDREMIEERLKTYAHLFDDKVMKQLKRRRYTGWGRLSRKLINGIRDKQSGKTILDFLKSDGFANRNFMQLIHDDSLTFKEDIQKAQVSGQGDSLHEHIANLAGSPAIKKGILQTVKVVDELVKVMGRHKPENIVIEMARENQTTQKGQKNSRERMKRIEEGIKELGSQILKEHPVENTQLQNEKLYLYYLQNGRDMYVDQELDINRLSDYDVDHIVPQSFLKDDSIDNKVLTRSDKNRGKSDNVPSEEVVKKMKNYWRQLLNAKLITQRKFDNLTKAERGGLSELDKAGFIKRQLVETRQITKHVAQILDSRMNTKYDENDKLIREVKVITLKSKLVSDFRKDFQFYKVREINNYHHAHDAYLNAVVGTALIKKYPKLESEFVYGDYKVYDVRKMIAKSEQEIGKATAKYFFYSNIMNFFKTEITLANGEIRKRPLIETNGETGEIVWDKGRDFATVRKVLSMPQVNIVKKTEVQTGGFSKESILPKRNSDKLIARKKDWDPKKYGGFVSPTVAYSVLVVAKVEKGKSKKLKSVKELLGITIMERSSFEKNPIDFLEAKGYKEVKKDLIIKLPKYSLFELENGRKRMLASARELQKGNELALPSKYVNFLYLASHYEKLKGSPEDNEQKQLFVEQHKHYLDEIIEQISEFSKRVILADANLDKVLSAYNKHRDKPIREQAENIIHLFTLTNLGAPAAFKYFDTTIDRKQYRSTKEVLDATLIHQSITGLYETRIDLSQLGGDEGADKRTADGSEFESPKKKRKV

SEQ ID NO: 350 - protein, 1588 aa, synthetic construct
  REGION 1..1588: note = 10. monoABE8.1_bpNLS +Y147R_Q154R_T166R polypeptide sequence
MSEVEFSHEYWMRHALTLAKRARDEREVPVGAVLVLNNRVIGEGWNRAIGLHDPTAHAEIMALRQGGLVMQNYRLIDATLYVTFEPCVMCAGAMIHSRIGRVVFGVRNAKTGAAGSLMDVLHYPGMNHRVEITEGILADECAALLCRFFRMPRRVFNAQKKAQSSRDSGGSSGGSSGSETPGTSESATPESSGGSSGGSDKKYSIGLAIGTNSVGWAVITDEYKVPSKKFKVLGNTDRHSIKKNLIGALLFDSGETAEATRLKRTARRRYTRRKNRICYLQEIFSNEMAKVDDSFFHRLEESFLVEEDKKHERHPIFGNIVDEVAYHEKYPTIYHLRKKLVDSTDKADLRLIYLALAHMIKFRGHFLIEGDLNPDNSDVDKLFIQLVQTYNQLFEENPINASGVDAKAILSARLSKSRRLENLIAQLPGEKKNGLFGNLIALSLGLTPNFKSNFDLAEDAKLQLSKDTYDDDLDNLLAQIGDQYADLFLAAKNLSDAILLSDILRVNTEITKAPLSASMIKRYDEHHQDLTLLKALVRQQLPEKYKEIFFDQSKNGYAGYIDGGASQEEFYKFIKPILEKMDGTEELLVKLNREDLLRKQRTFDNGSIPHQIHLGELHAILRRQEDFYPFLKDNREKIEKILTFRIPYYVGPLARGNSRFAWMTRKSEETITPWNFEEVVDKGASAQSFIERMTNFDKNLPNEKVLPKHSLLYEYFTVYNELTKVKYVTEGMRKPAFLSGEQKKAIVDLLFKTNRKVTVKQLKEDYFKKIECFDSVEISGVEDRFNASLGTYHDLLKIIKDKDFLDNEENEDILEDIVLTLTLFEDREMIEERLKTYAHLFDDKVMKQLKRRRYTGWGRLSRKLINGIRDKQSGKTILDFLKSDGFANRNFMQLIHDDSLTFKEDIQKAQVSGQGDSLHEHIANLAGSPAIKKGILQTVKVVDELVKVMGRHKPENIVIEMARENQTTQKGQKNSRERMKRIEEGIKELGSQILKEHPVENTQLQNEKLYLYYLQNGRDMYVDQELDINRLSDYDVDHIVPQSFLKDDSIDNKVLTRSDKNRGKSDNVPSEEVVKKMKNYWRQLLNAKLITQRKFDNLTKAERGGLSELDKAGFIKRQLVETRQITKHVAQILDSRMNTKYDENDKLIREVKVITLKSKLVSDFRKDFQFYKVREINNYHHAHDAYLNAVVGTALIKKYPKLESEFVYGDYKVYDVRKMIAKSEQEIGKATAKYFFYSNIMNFFKTEITLANGEIRKRPLIETNGETGEIVWDKGRDFATVRKVLSMPQVNIVKKTEVQTGGFSKESILPKRNSDKLIARKKDWDPKKYGGFVSPTVAYSVLVVAKVEKGKSKKLKSVKELLGITIMERSSFEKNPIDFLEAKGYKEVKKDLIIKLPKYSLFELENGRKRMLASARELQKGNELALPSKYVNFLYLASHYEKLKGSPEDNEQKQLFVEQHKHYLDEIIEQISEFSKRVILADANLDKVLSAYNKHRDKPIREQAENIIHLFTLTNLGAPAAFKYFDTTIDRKQYRSTKEVLDATLIHQSITGLYETRIDLSQLGGDEGADKRTADGSEFESPKKKRKV

SEQ ID NO: 351 - protein, 1588 aa, synthetic construct
  REGION 1..1588: note = 11. monoABE8.1_bpNLS +Y147T_Q154R polypeptide sequence
MSEVEFSHEYWMRHALTLAKRARDEREVPVGAVLVLNNRVIGEGWNRAIGLHDPTAHAEIMALRQGGLVMQNYRLIDATLYVTFEPCVMCAGAMIHSRIGRVVFGVRNAKTGAAGSLMDVLHYPGMNHRVEITEGILADECAALLCTFFRMPRRVFNAQKKAQSSTDSGGSSGGSSGSETPGTSESATPESSGGSSGGSDKKYSIGLAIGTNSVGWAVITDEYKVPSKKFKVLGNTDRHSIKKNLIGALLFDSGETAEATRLKRTARRRYTRRKNRICYLQEIFSNEMAKVDDSFFHRLEESFLVEEDKKHERHPIFGNIVDEVAYHEKYPTIYHLRKKLVDSTDKADLRLIYLALAHMIKFRGHFLIEGDLNPDNSDVDKLFIQLVQTYNQLFEENPINASGVDAKAILSARLSKSRRLENLIAQLPGEKKNGLFGNLIALSLGLTPNFKSNFDLAEDAKLQLSKDTYDDDLDNLLAQIGDQYADLFLAAKNLSDAILLSDILRVNTEITKAPLSASMIKRYDEHHQDLTLLKALVRQQLPEKYKEIFFDQSKNGYAGYIDGGASQEEFYKFIKPILEKMDGTEELLVKLNREDLLRKQRTFDNGSIPHQIHLGELHAILRRQEDFYPFLKDNREKIEKILTFRIPYYVGPLARGNSRFAWMTRKSEETITPWNFEEVVDKGASAQSFIERMTNFDKNLPNEKVLPKHSLLYEYFTVYNELTKVKYVTEGMRKPAFLSGEQKKAIVDLLFKTNRKVTVKQLKEDYFKKIECFDSVEISGVEDRFNASLGTYHDLLKIIKDKDFLDNEENEDILEDIVLTLTLFEDREMIEERLKTYAHLFDDKVMKQLKRRRYTGWGRLSRKLINGIRDKQSGKTILDFLKSDGFANRNFMQLIHDDSLTFKEDIQKAQVSGQGDSLHEHIANLAGSPAIKKGILQTVKVVDELVKVMGRHKPENIVIEMARENQTTQKGQKNSRERMKRIEEGIKELGSQILKEHPVENTQLQNEKLYLYYLQNGRDMYVDQELDINRLSDYDVDHIVPQSFLKDDSIDNKVLTRSDKNRGKSDNVPSEEVVKKMKNYWRQLLNAKLITQRKFDNLTKAERGGLSELDKAGFIKRQLVETRQITKHVAQILDSRMNTKYDENDKLIREVKVITLKSKLVSDFRKDFQFYKVREINNYHHAHDAYLNAVVGTALIKKYPKLESEFVYGDYKVYDVRKMIAKSEQEIGKATAKYFFYSNIMNFFKTEITLANGEIRKRPLIETNGETGEIVWDKGRDFATVRKVLSMPQVNIVKKTEVQTGGFSKESILPKRNSDKLIARKKDWDPKKYGGFVSPTVAYSVLVVAKVEKGKSKKLKSVKELLGITIMERSSFEKNPIDFLEAKGYKEVKKDLIIKLPKYSLFELENGRKRMLASARELQKGNELALPSKYVNFLYLASHYEKLKGSPEDNEQKQLFVEQHKHYLDEIIEQISEFSKRVILADANLDKVLSAYNKHRDKPIREQAENIIHLFTLTNLGAPAAFKYFDTTIDRKQYRSTKEVLDATLIHQSITGLYETRIDLSQLGGDEGADKRTADGSEFESPKKKRKV

SEQ ID NO: 352 - protein, 1588 aa, synthetic construct
  REGION 1..1588: note = 12. monoABE8.1_bpNLS +Y147T_Q154S polypeptide sequence
MSEVEFSHEYWMRHALTLAKRARDEREVPVGAVLVLNNRVIGEGWNRAIGLHDPTAHAEIMALRQGGLVMQNYRLIDATLYVTFEPCVMCAGAMIHSRIGRVVFGVRNAKTGAAGSLMDVLHYPGMNHRVEITEGILADECAALLCTFFRMPRSVFNAQKKAQSSTDSGGSSGGSSGSETPGTSESATPESSGGSSGGSDKKYSIGLAIGTNSVGWAVITDEYKVPSKKFKVLGNTDRHSIKKNLIGALLFDSGETAEATRLKRTARRRYTRRKNRICYLQEIFSNEMAKVDDSFFHRLEESFLVEEDKKHERHPIFGNIVDEVAYHEKYPTIYHLRKKLVDSTDKADLRLIYLALAHMIKFRGHFLIEGDLNPDNSDVDKLFIQLVQTYNQLFEENPINASGVDAKAILSARLSKSRRLENLIAQLPGEKKNGLFGNLIALSLGLTPNFKSNFDLAEDAKLQLSKDTYDDDLDNLLAQIGDQYADLFLAAKNLSDAILLSDILRVNTEITKAPLSASMIKRYDEHHQDLTLLKALVRQQLPEKYKEIFFDQSKNGYAGYIDGGASQEEFYKFIKPILEKMDGTEELLVKLNREDLLRKQRTFDNGSIPHQIHLGELHAILRRQEDFYPFLKDNREKIEKILTFRIPYYVGPLARGNSRFAWMTRKSEETITPWNFEEVVDKGASAQSFIERMTNFDKNLPNEKVLPKHSLLYEYFTVYNELTKVKYVTEGMRKPAFLSGEQKKAIVDLLFKTNRKVTVKQLKEDYFKKIECFDSVEISGVEDRFNASLGTYHDLLKIIKDKDFLDNEENEDILEDIVLTLTLFEDREMIEERLKTYAHLFDDKVMKQLKRRRYTGWGRLSRKLINGIRDKQSGKTILDFLKSDGFANRNFMQLIHDDSLTFKEDIQKAQVSGQGDSLHEHIANLAGSPAIKKGILQTVKVVDELVKVMGRHKPENIVIEMARENQTTQKGQKNSRERMKRIEEGIKELGSQILKEHPVENTQLQNEKLYLYYLQNGRDMYVDQELDINRLSDYDVDHIVPQSFLKDDSIDNKVLTRSDKNRGKSDNVPSEEVVKKMKNYWRQLLNAKLITQRKFDNLTKAERGGLSELDKAGFIKRQLVETRQITKHVAQILDSRMNTKYDENDKLIREVKVITLKSKLVSDFRKDFQFYKVREINNYHHAHDAYLNAVVGTALIKKYPKLESEFVYGDYKVYDVRKMIAKSEQEIGKATAKYFFYSNIMNFFKTEITLANGEIRKRPLIETNGETGEIVWDKGRDFATVRKVLSMPQVNIVKKTEVQTGGFSKESILPKRNSDKLIARKKDWDPKKYGGFVSPTVAYSVLVVAKVEKGKSKKLKSVKELLGITIMERSSFEKNPIDFLEAKGYKEVKKDLIIKLPKYSLFELENGRKRMLASARELQKGNELALPSKYVNFLYLASHYEKLKGSPEDNEQKQLFVEQHKHYLDEIIEQISEFSKRVILADANLDKVLSAYNKHRDKPIREQAENIIHLFTLTNLGAPAAFKYFDTTIDRKQYRSTKEVLDATLIHQSITGLYETRIDLSQLGGDEGADKRTADGSEFESPKKKRKV

SEQ ID NO: 353 - protein, 1588 aa, synthetic construct
  REGION 1..1588: note = 13. monoABE8.1_bpNLS +H123Y123H_Y147R_Q154R_I76Y polypeptide sequence
MSEVEFSHEYWMRHALTLAKRARDEREVPVGAVLVLNNRVIGEGWNRAIGLHDPTAHAEIMALRQGGLVMQNYRLYDATLYVTFEPCVMCAGAMIHSRIGRVVFGVRNAKTGAAGSLMDVLHHPGMNHRVEITEGILADECAALLCRFFRMPRRVFNAQKKAQSSTDSGGSSGGSSGSETPGTSESATPESSGGSSGGSDKKYSIGLAIGTNSVGWAVITDEYKVPSKKFKVLGNTDRHSIKKNLIGALLFDSGETAEATRLKRTARRRYTRRKNRICYLQEIFSNEMAKVDDSFFHRLEESFLVEEDKKHERHPIFGNIVDEVAYHEKYPTIYHLRKKLVDSTDKADLRLIYLALAHMIKFRGHFLIEGDLNPDNSDVDKLFIQLVQTYNQLFEENPINASGVDAKAILSARLSKSRRLENLIAQLPGEKKNGLFGNLIALSLGLTPNFKSNFDLAEDAKLQLSKDTYDDDLDNLLAQIGDQYADLFLAAKNLSDAILLSDILRVNTEITKAPLSASMIKRYDEHHQDLTLLKALVRQQLPEKYKEIFFDQSKNGYAGYIDGGASQEEFYKFIKPILEKMDGTEELLVKLNREDLLRKQRTFDNGSIPHQIHLGELHAILRRQEDFYPFLKDNREKIEKILTFRIPYYVGPLARGNSRFAWMTRKSEETITPWNFEEVVDKGASAQSFIERMTNFDKNLPNEKVLPKHSLLYEYFTVYNELTKVKYVTEGMRKPAFLSGEQKKAIVDLLFKTNRKVTVKQLKEDYFKKIECFDSVEISGVEDRFNASLGTYHDLLKIIKDKDFLDNEENEDILEDIVLTLTLFEDREMIEERLKTYAHLFDDKVMKQLKRRRYTGWGRLSRKLINGIRDKQSGKTILDFLKSDGFANRNFMQLIHDDSLTFKEDIQKAQVSGQGDSLHEHIANLAGSPAIKKGILQTVKVVDELVKVMGRHKPENIVIEMARENQTTQKGQKNSRERMKRIEEGIKELGSQILKEHPVENTQLQNEKLYLYYLQNGRDMYVDQELDINRLSDYDVDHIVPQSFLKDDSIDNKVLTRSDKNRGKSDNVPSEEVVKKMKNYWRQLLNAKLITQRKFDNLTKAERGGLSELDKAGFIKRQLVETRQITKHVAQILDSRMNTKYDENDKLIREVKVITLKSKLVSDFRKDFQFYKVREINNYHHAHDAYLNAVVGTALIKKYPKLESEFVYGDYKVYDVRKMIAKSEQEIGKATAKYFFYSNIMNFFKTEITLANGEIRKRPLIETNGETGEIVWDKGRDFATVRKVLSMPQVNIVKKTEVQTGGFSKESILPKRNSDKLIARKKDWDPKKYGGFVSPTVAYSVLVVAKVEKGKSKKLKSVKELLGITIMERSSFEKNPIDFLEAKGYKEVKKDLIIKLPKYSLFELENGRKRMLASARELQKGNELALPSKYVNFLYLASHYEKLKGSPEDNEQKQLFVEQHKHYLDEIIEQISEFSKRVILADANLDKVLSAYNKHRDKPIREQAENIIHLFTLTNLGAPAAFKYFDTTIDRKQYRSTKEVLDATLIHQSITGLYETRIDLSQLGGDEGADKRTADGSEFESPKKKRKV

SEQ ID NO: 354 - protein, 1588 aa, synthetic construct
  REGION 1..1588: note = 14. monoABE8.1_bpNLS + V82S +Q154R polypeptide sequence
MSEVEFSHEYWMRHALTLAKRARDEREVPVGAVLVLNNRVIGEGWNRAIGLHDPTAHAEIMALRQGGLVMQNYRLIDATLYSTFEPCVMCAGAMIHSRIGRVVFGVRNAKTGAAGSLMDVLHYPGMNHRVEITEGILADECAALLCYFFRMPRRVFNAQKKAQSSTDSGGSSGGSSGSETPGTSESATPESSGGSSGGSDKKYSIGLAIGTNSVGWAVITDEYKVPSKKFKVLGNTDRHSIKKNLIGALLFDSGETAEATRLKRTARRRYTRRKNRICYLQEIFSNEMAKVDDSFFHRLEESFLVEEDKKHERHPIFGNIVDEVAYHEKYPTIYHLRKKLVDSTDKADLRLIYLALAHMIKFRGHFLIEGDLNPDNSDVDKLFIQLVQTYNQLFEENPINASGVDAKAILSARLSKSRRLENLIAQLPGEKKNGLFGNLIALSLGLTPNFKSNFDLAEDAKLQLSKDTYDDDLDNLLAQIGDQYADLFLAAKNLSDAILLSDILRVNTEITKAPLSASMIKRYDEHHQDLTLLKALVRQQLPEKYKEIFFDQSKNGYAGYIDGGASQEEFYKFIKPILEKMDGTEELLVKLNREDLLRKQRTFDNGSIPHQIHLGELHAILRRQEDFYPFLKDNREKIEKILTFRIPYYVGPLARGNSRFAWMTRKSEETITPWNFEEVVDKGASAQSFIERMTNFDKNLPNEKVLPKHSLLYEYFTVYNELTKVKYVTEGMRKPAFLSGEQKKAIVDLLFKTNRKVTVKQLKEDYFKKIECFDSVEISGVEDRFNASLGTYHDLLKIIKDKDFLDNEENEDILEDIVLTLTLFEDREMIEERLKTYAHLFDDKVMKQLKRRRYTGWGRLSRKLINGIRDKQSGKTILDFLKSDGFANRNFMQLIHDDSLTFKEDIQKAQVSGQGDSLHEHIANLAGSPAIKKGILQTVKVVDELVKVMGRHKPENIVIEMARENQTTQKGQKNSRERMKRIEEGIKELGSQILKEHPVENTQLQNEKLYLYYLQNGRDMYVDQELDINRLSDYDVDHIVPQSFLKDDSIDNKVLTRSDKNRGKSDNVPSEEVVKKMKNYWRQLLNAKLITQRKFDNLTKAERGGLSELDKAGFIKRQLVETRQITKHVAQILDSRMNTKYDENDKLIREVKVITLKSKLVSDFRKDFQFYKVREINNYHHAHDAYLNAVVGTALIKKYPKLESEFVYGDYKVYDVRKMIAKSEQEIGKATAKYFFYSNIMNFFKTEITLANGEIRKRPLIETNGETGEIVWDKGRDFATVRKVLSMPQVNIVKKTEVQTGGFSKESILPKRNSDKLIARKKDWDPKKYGGFVSPTVAYSVLVVAKVEKGKSKKLKSVKELLGITIMERSSFEKNPIDFLEAKGYKEVKKDLIIKLPKYSLFELENGRKRMLASARELQKGNELALPSKYVNFLYLASHYEKLKGSPEDNEQKQLFVEQHKHYLDEIIEQISEFSKRVILADANLDKVLSAYNKHRDKPIREQAENIIHLFTLTNLGAPAAFKYFDTTIDRKQYRSTKEVLDATLIHQSITGLYETRIDLSQLGGDEGADKRTADGSEFESPKKKRKV

SEQ ID NO: 355 - protein, 4 aa, synthetic construct
  REGION 1..4: note = synthetic peptide sequence
SGGS

SEQ ID NO: 356 - protein, 24 aa, synthetic construct
  REGION 1..24: note = synthetic peptide sequence
SGGSSGSETPGTSESATPESSGGS

SEQ ID NO: 357 - protein, 32 aa, synthetic construct
  REGION 1..32: note = synthetic polypeptide sequence
SGGSSGGSSGSETPGTSESATPESSGGSSGGS

SEQ ID NO: 358 - protein, 104 aa, synthetic construct
  REGION 1..104: note = synthetic polypeptide sequence
GGSGGSPGSPAGSPTSTEEGTSESATPESGPGTSTEPSEGSAPGSPAGSPTSTEEGTSTEPSEGSAPGTSTEPSEGSAPGTSESATPESGPGSEPATSGGSGGS

SEQ ID NO: 359 - protein, 24 aa, synthetic construct
  REGION 1..24: note = synthetic peptide sequence
SGGSSGGSSGSETPGTSESATPES

SEQ ID NO: 360 - protein, 40 aa, synthetic construct
  REGION 1..40: note = synthetic polypeptide sequence
SGGSSGGSSGSETPGTSESATPESSGGSSGGSSGGSSGGS

SEQ ID NO: 361 - protein, 64 aa, synthetic construct
  REGION 1..64: note = synthetic polypeptide sequence
SGGSSGGSSGSETPGTSESATPESSGGSSGGSSGGSSGGSSGSETPGTSESATPESSGGSSGGS

SEQ ID NO: 362 - protein, 92 aa, synthetic construct
  REGION 1..92: note = synthetic polypeptide sequence
PGSPAGSPTSTEEGTSESATPESGPGTSTEPSEGSAPGSPAGSPTSTEEGTSTEPSEGSAPGTSTEPSEGSAPGTSESATPESGPGSEPATS

SEQ ID NO: 363 - protein, 5 aa, synthetic construct
  REGION 1..5: note = synthetic peptide sequence
PAPAP

SEQ ID NO: 364 - protein, 6 aa, synthetic construct
  REGION 1..6: note = synthetic peptide sequence
PAPAPA

SEQ ID NO: 365 - protein, 7 aa, synthetic construct
  REGION 1..7: note = synthetic peptide sequence
PAPAPAP

SEQ ID NO: 366 - protein, 8 aa, synthetic construct
  REGION 1..8: note = synthetic peptide sequence
PAPAPAPA

SEQ ID NO: 367 - protein, 9 aa, synthetic construct
  REGION 1..9: note = synthetic peptide sequence
PAPAPAPAP

SEQ ID NO: 368 - protein, 15 aa, synthetic construct
  REGION 1..15: note = synthetic peptide sequence
PAPAPAPAPAPAPAP

SEQ ID NO: 369 - protein, 21 aa, synthetic construct
  REGION 1..21: note = synthetic peptide sequence
PAPAPAPAPAPAPAPAPAPAP

SEQ ID NO: 370 - DNA, 306 bp, synthetic construct
  misc_feature 1..306: note = DnaE Intein-N polynucleotide sequence
  source 1..306: mol_type = other DNA
tgcctgtcatacgaaaccgagatactgacagtagaatatggccttctgccaatcgggaagattgtggagaaacggatagaatgcacagtttactctgtcgataacaatggtaacatttatactcagccagttgcccagtggcacgaccggggagagcaggaagtattcgaatactgtctggaggatggaagtctcattagggccactaaggaccacaaatttatgacagtcgatggccagatgctgcctatagacgaaatctttgagcgagagttggacctcatgcgagttgacaaccttcctaat

SEQ ID NO: 371 - protein, 102 aa, synthetic construct
  REGION 1..102: note = DnaE Intein-N polypeptide sequence
CLSYETEILTVEYGLLPIGKIVEKRIECTVYSVDNNGNIYTQPVAQWHDRGEQEVFEYCLEDGSLIRATKDHKFMTVDGQMLPIDEIFERELDLMRVDNLPN

SEQ ID NO: 372 - DNA, 108 bp, synthetic construct
  misc_feature 1..108: note = DnaE Intein-C polynucleotide sequence
  source 1..108: mol_type = other DNA
atgatcaagatagctacaaggaagtatcttggcaaacaaaacgtttatgatattggagtcgaaagagatcacaactttgctctgaagaacggattcatagcttctaat

SEQ ID NO: 373 - protein, 36 aa, synthetic construct
  REGION 1..36: note = DnaE Intein-C polypeptide sequence
MIKIATRKYLGKQNVYDIGVERDHNFALKNGFIASN

SEQ ID NO: 374 - DNA, 303 bp, synthetic construct
  misc_feature 1..303: note = Cfa-N polynucleotide sequence
  source 1..303: mol_type = other DNA
tgcctgtcttatgataccgagatacttaccgttgaatatggcttcttgcctattggaaagattgtcgaagagagaattgaatgcacagtatatactgtagacaagaatggtttcgtttacacacagcccattgctcaatggcacaatcgcggcgaacaagaagtatttgagtactgtctcgaggatggaagcatcatacgagcaactaaagatcataaattcatgaccactgacgggcagatgttgccaatagatgagatattcgagcggggcttggatctcaaacaagtggatggattgcca

SEQ ID NO: 375 - protein, 101 aa, synthetic construct
  REGION 1..101: note = Cfa-N polypeptide sequence
CLSYDTEILTVEYGFLPIGKIVEERIECTVYTVDKNGFVYTQPIAQWHNRGEQEVFEYCLEDGSIIRATKDHKFMTTDGQMLPIDEIFERGLDLKQVDGLP

SEQ ID NO: 376 - DNA, 159 bp, synthetic construct
  misc_feature 1..159: note = Cfa-C polynucleotide sequence
  source 1..159: mol_type = other DNA
atgaagaggactgccgatggatcagagtttgaatctcccaagaagaagaggaaagtaaagataatatctcgaaaaagtcttggtacccaaaatgtctatgatattggagtggagaaagatcacaacttccttctcaagaacggtctcgtagccagcaac

SEQ ID NO: 377 - protein, 53 aa, synthetic construct
  REGION 1..53: note = Cfa-C polypeptide sequence
MKRTADGSEFESPKKKRKVKIISRKSLGTQNVYDIGVEKDHNFLLKNGLVASN

SEQ ID NO: 378 - protein, 1081 aa, Neisseria meningitidis
  REGION 1..1081: note = MISC_FEATURE - Nme3Cas9; WP_002217928.1 type II CRISPR RNA-guided endonuclease Cas9 [Neisseria meningitidis]
  REGION 1..1081: note = MISC_FEATURE - NCBI Reference: WP_002217928.1; type II CRISPR RNA-guided endonuclease Cas9; Nme3Cas9 polypeptide sequence
MAAFKPNPINYILGLDIGIASVGWAMVEIDEEENPIRLIDLGVRVFERAEVPKTGDSLAMARRLARSVRRLTRRRAHRLLRARRLLKREGVLQAADFDENGLIKSLPNTPWQLRAAALDRKLTPLEWSAVLLHLIKHRGYLSQRKNEGETADKELGALLKGVADNAHALQTGDFRTPAELALNKFEKECGHIRNQRGDYSHTFSRKDLQAELNLLFEKQKEFGNPHVSGGLKEGIETLLMTQRPALSGDAVQKMLGHCTFEPAEPKAAKNTYTAERFIWLTKLNNLRILEQGSERPLTDTERATLMDEPYRKSKLTYAQARKLLSLEDTAFFKGLRYGKDNAEASTLMEMKAYHTISRALEKEGLKDKKSPLNLSPELQDEIGTAFSLFKTDEDITGRLKDRIQPEILEALLKHISFDKFVQISLKALRRIVPLMEQGKRYDEACAEIYGDHYGKKNTEEKIYLPPIPADEIRNPVVLRALSQARKVINGVVRRYGSPARIHIETAREVGKSFKDRKEIEKRQEENRKDREKAAAKFREYFPNFVGEPKSKDILKLRLYEQQHGKCLYSGKEINLGRLNEKGYVEIDHALPFSRTWDDSFNNKVLVLGSENQNKGNQTPYEYFNGKDNSREWQEFKARVETSRFPRSKKQRILLQKFDEDGFKERNLNDTRYVNRFLCQFVADRMRLTGKGKKRVFASNGQITNLLRGFWGLRKVRAENDRHHALDAVVVACSTVAMQQKITRFVRYKEMNAFDGKTIDKETGEVLHQKTHFPQPWEFFAQEVMIRVFGKPDGKPEFEEADTPEKLRTLLAEKLSSRPEAVHEYVTPLFVSRAPNRKMSGQGHMETVKSAKRLDEGVSVLRVPLTQLKLKDLEKMVNREREPKLYEALKARLEAHKDDPAKAFAEPFYKYDKAGNRTQQVKAVRVEQVQKTGVWVRNHNGIADNATMVRVDVFEKGDKYYLVPIYSWQVAKGILPDRAVVAYADEEDWTVIDESFRFKFVLYSNDLIKVQLKKDSFLGYFSGLDRATGAISLREHDLEKSKGKDGMHRIGVKTALSFQKYQIDEMGKEIRPCRLKKRPPVR

SEQ ID NO: 379 - RNA, 66 nt, synthetic construct
  misc_feature 1..66: note = Telomerase Ku Binding Motif oligonucleotide sequence
  source 1..66: mol_type = other RNA
ttcttgtcgtacttatagatcgctacgttatttcaattttgaaaatctgagtcctgggagtgcgga

SEQ ID NO: 380 - protein, 1094 aa, synthetic construct
  REGION 1..1094: note = Telomerase Ku Heterodimer polypeptide sequence
MSGWESYYKTEGDEEAEEEQEENLEASGDYKYSGRDSLIFLVDASKAMFESQSEDELTPFDMSIQCIQSVYISKIISSDRDLLAVVFYGTEKDKNSVNFKNIYVLQELDNPGAKRILELDQFKGQQGQKRFQDMMGHGSDYSLSEVLWVCANLFSDVQFKMSHKRIMLFTNEDNPHGNDSAKASRARTKAGDLRDTGIFLDLMHLKKPGGFDISLFYRDIISIAEDEDLRVHFEESSKLEDLLRKVRAKETRKRALSRLKLKLNKDIVISVGIYNLVQKALKPPPIKLYRETNEPVKTKTRTFNTSTGGLLLPSDTKRSQIYGSRQIILEKEETEELKRFDDPGLMLMGFKPLVLLKKHHYLRPSLFVYPEESLVIGSSTLFSALLIKCLEKEVAALCRYTPRRNIPPYFVALVPQEEELDDQKIQVTPPGFQLVFLPFADDKRKMPFTEKIMATPEQVGKMKAIVEKLRFTYRSDSFENPVLQQHFRNLEALALDLMEPEQAVDLTLPKVEAMNKRLGSLVDEFKELVYPPDYNPEGKVTKRKHDNEGSGSKRPKVEYSEEELKTHISKGTLGKFTVPMLKEACRAYGLKSGLKKQELLEALTKHFQDMVRSGNKAAVVLCMDVGFTMSNSIPGIESPFEQAKKVITMFVQRQVFAENKDEIALVLFGTDGTDNPLSGGDQYQNITVHRHLMLPDFDLLEDIESKIQPGSQQADFLDALIVSMDVIQHETIGKKFEKRHIEIFTDLSSRFSKSQLDIIIHSLKKCDISERHSIHWPCRLTIGSNLSIRIAAYKSILQERVKKTWTVVDAKTLKKEDIQKETVYCLNDDDETEVLKEDIIQGFRYGSDIVPFSKVDEEQMKYKSEGKCFSVLGFCKSSQVQRRFFMGNQVLKVFAARDDEAAAVALSSLIHALDDLDMVAIVRYAYDKRANPQVGVAFPHIKHNYECLVYVQLPFMEDLRQYMFSSLKNSKKYAPTEAQLNAVDALIDSMSLAKKDEKTDTLEDLFPTTKIPNPRFQRLFQCLLHRALHPREPLPPIQQHIWNMLNPPAEVTTKSQIPLSKIKTLFPLIEAKKKDQVTAQEIFQDNHEDGPTAK

SEQ ID NO: 381 - RNA, 10 nt, synthetic construct
  misc_feature 1..10: note = Telomerase Sm7 consensus site(single stranded) oligonucleotide sequence
  source 1..10: mol_type = other RNA
aatttttgga

SEQ ID NO: 382 - protein, 83 aa, synthetic construct
  REGION 1..83: note = MS2 coat protein polypeptide sequence
GSVIDVSSQRVNVQRPLDALGNSLNSPVIIKLKGDREFRGVLKSFDLHMNLVLNDAEELEDGEVTRRLGTVLIRGDNIVYISP

SEQ ID NO: 383 - RNA, 26 nt, synthetic construct
  misc_feature 1..26: note = PP7 phage operator stem loop oligonucleotide sequence
  source 1..26: mol_type = other RNA
ataaggagtttatatggaaaccctta

SEQ ID NO: 384 - protein, 128 aa, synthetic construct
  REGION 1..128: note = PP7 coat protein (PCP)polypeptide sequence
MSKTIVLSVGEATRTLTEIQSTADRQIFEEKVGPLVGRLRLTASLRQNGAKTAYRVNLKLDQADVVDCSTSVCGELPKVRYTQVWSHDVTIVANSTEASRKSLYDLTKSLVATSQVEDLVVNLVPLGR

SEQ ID NO: 385 - RNA, 19 nt, synthetic construct
  misc_feature 1..19: note = SfMu Com stem loop oligonucleotide sequence
  source 1..19: mol_type = other RNA
ctgaatgcctgcgagcatc

SEQ ID NO: 386 - protein, 62 aa, synthetic construct
  REGION 1..62: note = SfMu Com binding protein polypeptide sequence
MKSIRCKNCNKLLFKADSFDHIEIRCPRCKRHIIMLNACEHPTEKHCGKREKITHSDETVRY

SEQ ID NO: 387 - protein, 47 aa, synthetic construct
  REGION 1..47: note = leucine zipper polypeptide sequence
LEIRAAFLRQRNTALRTEVAELEQEVQRLENEVSQYETRYGPLGGGK

SEQ ID NO: 388 - protein, 47 aa, synthetic construct
  REGION 1..47: note = leucine zipper polypeptide sequence
LEIEAAFLERENTALETRVAELRQRVQRLRNRVSQYRTRYGPLGGGK

SEQ ID NO: 389 - DNA, 303 bp, synthetic construct
  source 1..303: mol_type = other DNA
tgcctgagctacgataccgagatcctgaccgtggaatacggcttcctgcctatcggcaagatcgtcgaggaacggatcgagtgcacagtgtacaccgtggataagaatggcttcgtgtacacccagcctatcgctcagtggcacaacagaggcgagcaagaggtgttcgagtactgcctggaagatggcagcatcatccgggccaccaaggaccacaagtttatgaccaccgacggccagatgctgcccatcgacgagatctttgagagaggcctggacctgaaacaggtggacggactgcct

SEQ ID NO: 390 - protein, 101 aa, synthetic construct; identical to SEQ ID NO: 375

SEQ ID NO: 391 - DNA, 264 bp, synthetic construct
  source 1..264: mol_type = other DNA
tgtctggacctcaagacccaagtgcagacacctcagggcatgaaagagattagcaatatccaggtgggcgacctggtcctgagcaacaccggctacaacgaggtgctgaacgtgttccctaagtccaagaagaaatcttataagatcaccctggaagatggcaaggaaatcatctgcagcgaggaacacctgttccccacccagaccggcgagatgaacatcagcggcggactgaaggagggcatgtgcctgtacgtgaaggag

SEQ ID NO: 392 - protein, 88 aa, synthetic construct
CLDLKTQVQTPQGMKEISNIQVGDLVLSNTGYNEVLNVFPKSKKKSYKITLEDGKEIICSEEHLFPTQTGEMNISGGLKEGMCLYVKE

SEQ ID NO: 393 - DNA, 267 bp, synthetic construct
  source 1..267: mol_type = other DNA
tgcctgagcctggacaccatggtggtgacaaacggcaaggccatcgagatcagagatgtgaaggtgggagattggctggaaagcgaatgtggcccagtgcaggttacagaggtgctgcctatcatcaagcagcctgtctttgagattgtgctgaaaagcggaaaaaagatccgggtgtccgctaatcacaagttccccaccaaggacggcctcaagaccatcaacagcggcctgaaggtgggcgacttcctgagaagcagagccaag

SEQ ID NO: 394 - protein, 89 aa, synthetic construct
CLSLDTMVVTNGKAIEIRDVKVGDWLESECGPVQVTEVLPIIKQPVFEIVLKSGKKIRVSANHKFPTKDGLKTINSGLKVGDFLRSRAK

SEQ ID NO: 395 - DNA, 303 bp, synthetic construct
  source 1..303: mol_type = other DNA
tgttttgtgcctggcaccctggtgaacacagagaatggcctgaagaaaatcgaggaaatcaaggtgggcgacaaggtgttcagccatacaggcaagctgcaggaggtggtggacaccctgatcttcgaccgggacgaggaaatcatctctatcaacggcattgattgcaccaagaaccacgagttctacgtgatcgataaggaaaacgctaatagagtgaacgaggacaacatccacctcttcgccagatgggtccacgccgaggaactggatatgaaaaagcacctgctgatcgagctggaa

SEQ ID NO: 396 - protein, 101 aa, synthetic construct
CFVPGTLVNTENGLKKIEEIKVGDKVFSHTGKLQEVVDTLIFDRDEEIISINGIDCTKNHEFYVIDKENANRVNEDNIHLFARWVHAEELDMKKHLLIELE

SEQ ID NO: 397 - DNA, 315 bp, synthetic construct
  source 1..315: mol_type = other DNA
tgcctggtgggctctagcgagattatcacaagaaactacggcaagaccaccatcaaggaagtggtcgagatcttcgacaacgacaagaatatccaggtgctggccttcaacacccacaccgataatatcgagtgggcccctatcaaggccgctcagctgaccagacctaacgccgagctggttgaactggaaatcgacaccctgcacggcgtgaaaacaatccggtgcacccctgaccaccccgtgtacaccaagaacagaggctacgtgcgggccgacgagctgacagatgatgacgagctcgtggtggctatc

SEQ ID NO: 398 - protein, 105 aa, synthetic construct
CLVGSSEIITRNYGKTTIKEVVEIFDNDKNIQVLAFNTHTDNIEWAPIKAAQLTRPNAELVELEIDTLHGVKTIRCTPDHPVYTKNRGYVRADELTDDDELVVAI

SEQ ID NO: 399 - DNA, 306 bp, synthetic construct
  source 1..306: mol_type = other DNA
tgcctgagctacgagacagagatcctgaccgtggaatatggcctgctgccaatcggaaagatcgtggaaaagcggatcgagtgcaccgtctacagcgtggacaacaacggaaatatctatacacagcctgtggcccaatggcacgaccggggcgaacaggaggtgtttgagtactgcctggaagatggttctctgattagagccaccaaggaccacaagttcatgaccgtcgacggccagatgctgcccatcgacgaaatcttcgagcgggaactcgacctgatgagagtggataacctgcccaat

SEQ ID NO: 400 - protein, 102 aa, synthetic construct; identical to SEQ ID NO: 371

SEQ ID NO: 401 - protein, 101 aa, synthetic construct; identical to SEQ ID NO: 375

SEQ ID NO: 402 - protein, 102 aa, synthetic construct; identical to SEQ ID NO: 371

SEQ ID NO: 403 - DNA, 279 bp, synthetic construct
  source 1..279: mol_type = other DNA
acaagaagcggatactgtctggacctcaagacccaagtgcagacacctcagggcatgaaagagattagcaatatccaggtgggcgacctggtcctgagcaacaccggctacaacgaggtgctgaacgtgttccctaagtccaagaagaaatcttataagatcaccctggaagatggcaaggaaatcatctgcagcgaggaacacctgttccccacccagaccggcgagatgaacatcagcggcggactgaaggagggcatgtgcctgtacgtgaaggag

SEQ ID NO: 404 - protein, 93 aa, synthetic construct
TRSGYCLDLKTQVQTPQGMKEISNIQVGDLVLSNTGYNEVLNVFPKSKKKSYKITLEDGKEIICSEEHLFPTQTGEMNISGGLKEGMCLYVKE

SEQ ID NO: 405 - DNA, 282 bp, synthetic construct
  source 1..282: mol_type = other DNA
tctcagctgaaccggtgcctgagcctggacaccatggtggtgacaaacggcaaggccatcgagatcagagatgtgaaggtgggagattggctggaaagcgaatgtggcccagtgcaggttacagaggtgctgcctatcatcaagcagcctgtctttgagattgtgctgaaaagcggaaaaaagatccgggtgtccgctaatcacaagttccccaccaaggacggcctcaagaccatcaacagcggcctgaaggtgggcgacttcctgagaagcagagccaag

SEQ ID NO: 406 - protein, 94 aa, synthetic construct
SQLNRCLSLDTMVVTNGKAIEIRDVKVGDWLESECGPVQVTEVLPIIKQPVFEIVLKSGKKIRVSANHKFPTKDGLKTINSGLKVGDFLRSRAK

SEQ ID NO: 407 - DNA, 318 bp, synthetic construct
  source 1..318: mol_type = other DNA
ggcatcggcggaggatgttttgtgcctggcaccctggtgaacacagagaatggcctgaagaaaatcgaggaaatcaaggtgggcgacaaggtgttcagccatacaggcaagctgcaggaggtggtggacaccctgatcttcgaccgggacgaggaaatcatctctatcaacggcattgattgcaccaagaaccacgagttctacgtgatcgataaggaaaacgctaatagagtgaacgaggacaacatccacctcttcgccagatgggtccacgccgaggaactggatatgaaaaagcacctgctgatcgagctggaa

SEQ ID NO: 408 - protein, 106 aa, synthetic construct
GIGGGCFVPGTLVNTENGLKKIEEIKVGDKVFSHTGKLQEVVDTLIFDRDEEIISINGIDCTKNHEFYVIDKENANRVNEDNIHLFARWVHAEELDMKKHLLIELE

SEQ ID NO: 409 - DNA, 330 bp, synthetic construct
  source 1..330: mol_type = other DNA
ggaacaaacccatgttgcctggtgggctctagcgagattatcacaagaaactacggcaagaccaccatcaaggaagtggtcgagatcttcgacaacgacaagaatatccaggtgctggccttcaacacccacaccgataatatcgagtgggcccctatcaaggccgctcagctgaccagacctaacgccgagctggttgaactggaaatcgacaccctgcacggcgtgaaaacaatccggtgcacccctgaccaccccgtgtacaccaagaacagaggctacgtgcgggccgacgagctgacagatgatgacgagctcgtggtggctatc

SEQ ID NO: 410 - protein, 110 aa, synthetic construct
GTNPCCLVGSSEIITRNYGKTTIKEVVEIFDNDKNIQVLAFNTHTDNIEWAPIKAAQLTRPNAELVELEIDTLHGVKTIRCTPDHPVYTKNRGYVRADELTDDDELVVAI

SEQ ID NO: 411 - DNA, 105 bp, synthetic construct
  source 1..105: mol_type = other DNA
gtcaagatcatcagcagaaagagcctgggcacccagaacgtgtacgatatcggagtgggcgagccccacaactttctgctcaagaatggcctggtggccagcaac

SEQ ID NO: 412 - protein, 35 aa, synthetic construct
VKIISRKSLGTQNVYDIGVGEPHNFLLKNGLVASN

SEQ ID NO: 413 - DNA, 114 bp, synthetic construct
  source 1..114: mol_type = other DNA
atgatgctgaaaaagatcctgaagatcgaggaactggatgagagagagctgatcgacatcgaagtgtctggcaatcacctgttctacgccaacgacatcctgacccacaacagc

SEQ ID NO: 414 - protein, 38 aa, synthetic construct
MMLKKILKIEELDERELIDIEVSGNHLFYANDILTHNS

SEQ ID NO: 415 - DNA, 138 bp, synthetic construct
  source 1..138: mol_type = other DNA
atgtgcgaaatcttcgagaacgagattgattgggacgaaatcgcctctatcgagtacgtgggcgtggaagagacaatcgacatcaacgtgaccaacgacagactgtttttcgccaatggcatcctgacccacaacagc

SEQ ID NO: 416 - protein, 46 aa, synthetic construct
MCEIFENEIDWDEIASIEYVGVEETIDINVTNDRLFFANGILTHNS

SEQ ID NO: 417 - DNA, 123 bp, synthetic construct
  source 1..123: mol_type = other DNA
atgaaattcaagctgaaggaaatcaccagcatcgagacaaagcactacaagggcaaggtgcacgatctgaccgtgaaccaggaccacagctacaacgtcagaggcaccgtggtgcataattct

SEQ ID NO: 418 - protein, 41 aa, synthetic construct
MKFKLKEITSIETKHYKGKVHDLTVNQDHSYNVRGTVVHNS

SEQ ID NO: 419 - DNA, 123 bp, synthetic construct
  source 1..123: mol_type = other DNA
atggaagccaagacctacatcggcaagctgaaatctagaaagatcgtgtccaacgaggatacatacgacatccagaccagcacccacaatttcttcgccaacgacatcctggtgcacaacagc

SEQ ID NO: 420 - protein, 41 aa, synthetic construct
MEAKTYIGKLKSRKIVSNEDTYDIQTSTHNFFANDILVHNS

SEQ ID NO: 421 - DNA, 108 bp, synthetic construct
  source 1..108: mol_type = other DNA
atgatcaagatcgccacaagaaagtacctgggcaagcagaacgtgtacgacatcggcgtggagagagaccacaacttcgccctgaagaacggctttatcgcctctaat

SEQ ID NO: 422 - protein, 36 aa, synthetic construct; identical to SEQ ID NO: 373

SEQ ID NO: 423 - protein, 36 aa, synthetic construct
MVKIISRKSLGTQNVYDIGVGEPHNFLLKNGLVASN

SEQ ID NO: 424 - protein, 35 aa, synthetic construct
IKIATRKYLGKQNVYDIGVERDHNFALKNGFIASN

SEQ ID NO: 425 - protein, 119 aa, Homo sapiens
MSRSVALAVLALLSLSGLEAIQRTPKIQVYSRHPAENGKSNFLNCYVSGFHPSDIEVDLLKNGERIEKVEHSDLSFSKDWSFYLLYYTEFTPTEKDEYACRVNHVTLSQPKIVKWDRDM

SEQ ID NO: 426 - protein, 99 aa, Homo sapiens [sequence omitted]

SEQ ID NO: 427 - protein, 119 aa, Homo sapiens
MSRSVALAVLALLSLSGLEAIQRTPKIQVYSRHPAENGKSNFLNCYVSGFHPSDIEVDLLKNGERIEKVEHSDLSFSEDWSFYLLYYTEFTPTEKDEYACRVNHVTLSQPKIVKWDRDM

SEQ ID NO: 428 - protein, 119 aa, Homo sapiens
MSRSVALAVLALLSLSGLEAIQRTPKIQVYSRHPAENGKSNFLNCYVSGFHPSDIEVDLLKNGERIEKVEHSDLSFSKDGSFYLLYYTEFTPTEKDEYACRVNHVTLSQPKIVKWDRDM

SEQ ID NO: 429 - protein, 119 aa, Homo sapiens
MSRSVALAVLALLSLSGLEAIQRTPKIQVYSRHPAENGKSNFLNCYVSGFHPSDIEVDLLKNGERIEKVEHSDLSFSEDGSFYLLYYTEFTPTEKDEYACRVNHVTLSQPKIVKWDRDM

SEQ ID NO: 430 - protein, 119 aa, Homo sapiens
MSRSVALAVLALLSLSGLEAIQRTPKIQVYSRHPAENGKSNFLNCYVSGFHPSDIEVDLLKNGERIEKVEHSDLSFSKDWSFYLLYYTEFTPTEKDEYACRVNHVTLSQPKIVKGDRDM

SEQ ID NO: 431 - DNA, 9199 bp, Homo sapiens
  source 1..9199: mol_type = genomic DNA
catgtcataaatggtaagtccaagaaaaatacaggtattcccccccaaagaaaactgtaaaatcgacttttttctatctgtactgttttttattggtttttaaattggttttccaagtgagtaaatcagaatctatctgtaatggattttaaatttagtgtttctctgtgatgtagtaaacaagaaactagaggcaaaaatagccctgtcccttgctaaacttctaaggcacttttctagtacaactcaacactaacatttcaggcctttagtgccttatatgagtttttaaaagggggaaaagggagggagcaagagtgtcttaactcatacatttaggcataacaattattctcatattttagttattgagagggctggtagaaaaactaggtaaataatattaataattatagcgcttattaaacactacagaacacttactatgtaccaggcattgtgggaggctctctcttgtgcattatctcatttcattaggtccatggagagtattgcattttcttagtttaggcatggcctccacaataaagattatcaaaagcctaaaaatatgtaaaagaaacctagaagttatttgttgtgctccttggggaagctaggcaaatcctttcaactgaaaaccatggtgacttccaagatctctgcccctccccatcgccatggtccacttcctcttctcactgttcctcttagaaaagatctgtggactccaccaccacgaaatggcggcaccttatttatggtcactttagagggtaggttttcttaatgggtctgcctgtcatgtttaacgtccttggctgggtccaaggcagatgcagtccaaactctcactaaaattgccgagccctttgtcttccagtgtctaaaatattaatgtcaatggaatcaggccagagtttgaattctagtctcttagcctttgtttcccctgtccataaaatgaatgggggtaattctttcctcctacagtttatttatatattcactaattcattcattcatccatccattcgttcattcggtttactgagtacctactatgtgccagcccctgttctagggtggaaactaagagaatgatgtacctagagggcgctggaagctctaaagccctagcagttactgcttttactattagtggtcgtttttttctcccccccgccccccgacaaatcaacagaacaaagaaaattacctaaacagcaaggacatagggaggaacttcttggcacagaactttccaaacactttttcctgaagggatacaagaagcaagaaaggtactctttcactaggaccttctctgagctgtcctcaggatgcttttgggactatttttcttacccagagaatggagaaaccctgcagggaattcccaagctgtagttataaacagaagttctccttctgctaggtagcattcaaagatcttaatcttctgggtttccgttttctcgaatgaaaaatgcaggtccgagcagttaactggctggggcaccattagcaagtcacttagcatctctggggccagtctgcaaagcgagggggcagccttaatgtgcctccagcctgaagtcctagaatgagcgcccggtgtcccaagctggggcgcgcaccccagatcggagggcgccgatgtacagacagcaaactcacccagtctagtgcatgccttcttaaacatcacgagactctaagaaaaggaaactgaaaacgggaaagtccctctctctaacctggcactgcgtcgctggcttggagacaggtgacggtccctgcgggccttgtcctgattggctgggcacgcgtttaatataagtggaggcgtcgcgctggcgggcattcctgaagctgacagcattcgggccgagatgtctcgctccgtggccttagctgtgctcgcgctactctctctttctggcctggaggctatccagcgtgagtctctcctaccctcccgctctggtccttcctctcccgctctgcaccctctgtggccctcgctgtgctctctcgctccgtgacttcccttctccaagttctccttggtggcccgccgtggggctagtccagggctggatctcggggaagcggcggggtggcctgggagtggggaagggggtgcgcacccgggacgcgcgctacttgcccctttcggcggggagcaggggagacctttggcctacggcgacgggagggtcgggacaaagtttagggcgtcgataagcgtcagagcgccgaggttgggggagggtttctcttccgctctttcgcggggcctctggctcccccagcgcagctggagtgggggacgggtaggctcgtcccaaaggcgcggcgctgaggtttgtgaacgcgtggaggggcgcttggggtctgggggaggcgtcgcccgggtaagcctgtctgctgcggctctgcttcccttagactggagagctgtggacttcgtctaggcgcccgctaagttcgcatgtcctagcacctctgggtctatgtggggccacaccgtggggaggaaacagcacgcgacgtttgtagaatgcttggctgtgatacaaagcggtttcgaataattaacttatttgttcccatcacatgtcacttttaaaaaattataagaactacccgttattgacatctttctgtgtgccaaggactttatgtgctttgcgtcatttaattttgaaaacagttatcttccgccatagataactactatggttatcttctgcctctcacagatgaagaaactaaggcaccgagattttaagaaacttaattacacaggggataaatggcagcaatcgagattgaagtcaagcctaaccagggcttttgcgggagcgcatgccttttggctgtaattcgtgcatttttttttaagaaaaacgcctgccttctgcgtgagattctccagagcaaactgggcggcatgggccctgtggtcttttcgtacagagggcttcctctttggctctttgcctggttgtttccaagatgtactgtgcctcttactttcggttttgaaaacatgagggggttgggcgtggtagcttacgcctgtaatcccagcacttagggaggccgaggcgggaggatggcttgaggtccgtagttgagaccagcctggccaacatggtgaagcctggtctctacaaaaaataataacaaaaattagccgggtgtggtggctcgtgcctgtggtcccagctgctccggtggctgaggcgggaggatctcttgagcttaggcttttgagctatcatggcgccagtgcactccagcgtgggcaacagagcgagaccctgtctctcaaaaaagaaaaaaaaaaaaaaagaaagagaaaagaaaagaaagaaagaagtgaaggtttgtcagtcaggggagctgtaaaaccattaataaagataatccaagatggttaccaagactgttgaggacgccagagatcttgagcactttctaagtacctggcaatacactaagcgcgctcaccttttcctctggcaaaacatgatcgaaagcagaatgttttgatcatgagaaaattgcatttaatttgaatacaatttatttacaacataaaggataatgtatatatcaccaccattactggtatttgctggttatgttagatgtcattttaaaaaataacaatctgatatttaaaaaaaaatcttattttgaaaatttccaaagtaatacatgccatgcatagaccatttctggaagataccacaagaaacatgtaatgatgattgcctctgaaggtctattttcctcctctgacctgtgtgtgggttttgtttttgttttactgtgggcataaattaatttttcagttaagttttggaagcttaaataactctccaaaagtcataaagccagtaactggttgagcccaaattcaaacccagcctgtctgatacttgtcctcttcttagaaaagattacagtgatgctctcacaaaatcttgccgccttccctcaaacagagagttccaggcaggatgaatctgtgctctgatccctgaggcatttaatatgttcttattattagaagctcagatgcaaagagctctcttagcttttaatgttatgaaaaaaatcaggtcttcattagattccccaatccacctcttgatggggctagtagcctttccttaatgatagggtgtttctagagagatatatctggtcaaggtggcctggtactcctccttctccccacagcctcccagacaaggaggagtagctgccttttagtgatcatgtaccctgaatataagtgtatttaaaagaattttatacacatatatttagtgtcaatctgtatatttagtagcactaacacttctcttcattttcaatgaaaaatatagagtttataatattttcttcccacttccccatggatggtctagtcatgcctctcattttggaaagtactgtttctgaaacattaggcaatatattcccaacctggctagtttacagcaatcacctgtggatgctaattaaaacgcaaatcccactgtcacatgcattactccatttgatcataatggaaagtatgttctgtcccatttgccatagtcctcacctatccctgttgtattttatcgggtccaactcaaccatttaaggtatttgccagctcttgtatgcatttaggttttgtttctttgttttttagctcatgaaattaggtacaaagtcagagaggggtctggcatataaaacctcagcagaaataaagaggttttgttgtttggtaagaacataccttgggttggttgggcacggtggctcgtgcctgtaatcccaacactttgggaggccaaggcaggctgatcacttgaagttgggagttcaagaccagcctggccaacatggtgaaatcccgtctctactgaaaatacaaaaattaaccaggcatggtggtgtgtgcctgtagtcccaggaatcacttgaacccaggaggcggaggttgcagtgagctgagatctcaccactgcacactgcactccagcctgggcaatggaatgagattccatcccaaaaaataaaaaaataaaaaaataaagaacataccttgggttgatccacttaggaacctcagataataacatctgccacgtatagagcaattgctatgtcccaggcactctactagacacttcatacagtttagaaaatcagatgggtgtagatcaaggcaggagcaggaaccaaaaagaaaggcataaacataagaaaaaaaatggaaggggtggaaacagagtacaataacatgagtaatttgatgggggctattatgaactgagaaatgaactttgaaaagtatcttggggccaaatcatgtagactcttgagtgatgtgttaaggaatgctatgagtgctgagagggcatcagaagtccttgagagcctccagagaaaggctcttaaaaatgcagcgcaatctccagtgacagaagatactgctagaaatctgctagaaaaaaaacaaaaaaggcatgtatagaggaattatgagggaaagataccaagtcacggtttattcttcaaaatggaggtggcttgttgggaaggtggaagctcatttggccagagtggaaatggaattgggagaaatcgatgaccaaatgtaaacacttggtgcctgatatagcttgacaccaagttagccccaagtgaaataccctggcaatattaatgtgtcttttcccgatattcctcaggtactccaaagattcaggtttactcacgtcatccagcagagaatggaaagtcaaatttcctgaattgctatgtgtctgggtttcatccatccgacattgaagttgacttactgaagaatggagagagaattgaaaaagtggagcattcagacttgtctttcagcaaggactggtctttctatctcttgtactacactgaattcacccccactgaaaaagatgagtatgcctgccgtgtgaaccatgtgactttgtcacagcccaagatagttaagtggggtaagtcttacattcttttgtaagctgctgaaagttgtgtatgagtagtcatatcataaagctgctttgatataaaaaaggtctatggccatactaccctgaatgagtcccatcccatctgatataaacaatctgcatattgggattgtcagggaatgttcttaaagatcagattagtggcacctgctgagatactgatgcacagcatggtttctgaaccagtagtttccctgcagttgagcagggagcagcagcagcacttgcacaaatacatatacactcttaacacttcttacctactggcttcctctagcttttgtggcagcttcaggtatatttagcactgaacgaacatctcaagaaggtataggcctttgtttgtaagtcctgctgtcctagcatcctataatcctggacttctccagtactttctggctggattggtatctgaggctagtaggaagggcttgttcctgctgggtagctctaaacaatgtattcatgggtaggaacagcagcctattctgccagccttatttctaaccattttagacatttgttagtacatggtattttaaaagtaaaacttaatgtcttccttttttttctccactgtctttttcatagatcgagacatgtaagcagcatcatggaggtaagtttttgaccttgagaaaatgtttttgtttcactgtcctgaggactatttatagacagctctaacatgataaccctcactatgtggagaacattgacagagtaacattttagcagggaaagaagaatcctacagggtcatgttcccttctcctgtggagtggcatgaagaaggtgtatggccccaggtatggccatattactgaccctctacagagagggcaaaggaactgccagtatggtattgcaggataaaggcaggtggttacccacattacctgcaaggctttgatctttcttctgccatttccacattggacatctctgctgaggagagaaaatgaaccactcttttcctttgtataatgttgttttattcttcagacagaagagaggagttatacagctctgcagacatcccattcctgtatggggactgtgtttgcctcttagaggttcccaggccactagaggagataaagggaaacagattgttataacttgatataatgatactataatagatgtaactacaaggagctccagaagcaagagagagggaggaacttggacttctctgcatctttagttggagtccaaaggcttttcaatgaaattctactgcccagggtacattgatgctgaaaccccattcaaatctcctgttatattctagaacagggaattgatttgggagagcatcaggaaggtggatgatctgcccagtcacactgttagtaaattgtagagccaggacctgaactctaatatagtcatgtgttacttaatgacggggacatgttctgagaaatgcttacacaaacctaggtgttgtagcctactacacgcataggctacatggtatagcctattgctcctagactacaaacctgtacagcctgttactgtactgaatactgtgggcagttgtaacacaatggtaagtatttgtgtatctaaacatagaagttgcagtaaaaatatgctattttaatcttatgagaccactgtcatatatacagtccatcattgaccaaaacatcatatcagcattttttcttctaagattttgggagcaccaaagggatacactaacaggatatactctttataatgggtttggagaactgtctgcagctacttcttttaaaaaggtgatctacacagtagaaattagacaagtttggtaatgagatctgcaatccaaataaaataaattcattgctaacctttttcttttcttttcaggtttgaagatgccgcatttggattggatgaattccaaattctgcttgcttgctttttaatattgatatgcttatacacttacactttatgcacaaaatgtagggttataataatgttaacatggacatgatcttctttataattctactttgagtgctgtctccatgtttgatgtatctgagcaggttgctccacaggtagctctaggagggctggcaacttagaggtggggagcagagaattctcttatccaacatcaacatcttggtcagatttgaactcttcaatctcttgcactcaaagcttgttaagatagttaagcgtgcataagttaacttccaatttacatactctgcttagaatttgggggaaaatttagaaatataattgacaggattattggaaatttgttataatgaatgaaacattttgtcatataagattcatatttacttcttatacatttgataaagtaaggcatggttgtggttaatctggtttatttttgttccacaagttaaataaatcataaaacttgatgtgttatctcttatatctcactcccactattacccctttattttcaaacagggaaacagtcttcaagttccacttggtaaaaaatgtgaaccccttgtatatagagtttggctcacagtgtaaagggcctcagtgattcacattttccagattaggaatctgatgctcaaagaagttaaatggcatagttggggtgacacagctgtctagtgggaggccagccttctatattttagccagcgttctttcctgcgggccaggtcatgaggagtatgcagactctaagagggagcaaaagtatctgaaggatttaatattttagcaaggaatagatatacaatcatcccttggtctccctgggggattggtttcaggaccccttcttggacaccaaatctatggatatttaagtcccttctataaaatggtatagtatttgcatataacctatccacatcctcctgtatactttaaatcatttctagattacttgtaatacctaatacaatgtaaatgctatgcaaatagttgttattgtttaaggaataatgacaagaaaaaaaagtctgtacatgctcagtaaagacacaaccatccctttttttccccagtgtttttgatccatggtttgctgaatccacagatgtggagcccctggatacggaaggcccgctgtactttgaatgacaaataacagatttaaa

SEQ ID NO: 432 - DNA, 357 bp, Homo sapiens
  source 1..357: mol_type = genomic DNA
atgagccggagcgtggctctggccgtgctggccctattgtctctgagcggactggaagccatccagagaaccccaaagatccaagtgtacagcagacaccctgccgagaacggcaagagcaatttcctgaactgctacgtgtccggctttcaccccagcgacatcgaggtggatctgctgaagaacggcgagagaatcgagaaggtcgaacacagcgatctgagcttcagcaaggattggtccttctacctgctgtactacaccgagttcacccctacagagaaggacgagtacgcctgcagagtgaaccacgtgaccctgagccagcctaagatcgtgaagtgggatagagatatg

SEQ ID NO: 433 - DNA, 357 bp, Homo sapiens
  source 1..357: mol_type = genomic DNA
atgagccggagcgtggctctggccgtgctggccctattgtctctgagcggactggaagccatccagagaaccccaaagatccaagtgtacagcagacaccctgccgagaacggcaagagcaatttcctgaactgctacgtgtccggctttcaccccagcgacatcgaggtggatctgctgaagaacggcgagagaatcgagaaggtcgaacacagcgatctgagcttcagcgaagattggtccttctacctgctgtactacaccgagttcacccctacagagaaggacgagtacgcctgcagagtgaaccacgtgaccctgagccagcctaagatcgtgaagtgggatagagatatg

SEQ ID NO: 434 - DNA, 357 bp, Homo sapiens
  source 1..357: mol_type = genomic DNA
atgagccggagcgtggctctggccgtgctggccctattgtctctgagcggactggaagccatccagagaaccccaaagatccaagtgtacagcagacaccctgccgagaacggcaagagcaatttcctgaactgctacgtgtccggctttcaccccagcgacatcgaggtggatctgctgaagaacggcgagagaatcgagaaggtcgaacacagcgatctgagcttcagcaaggatggatccttctacctgctgtactacaccgagttcacccctacagagaaggacgagtacgcctgcagagtgaaccacgtgaccctgagccagcctaagatcgtgaagtgggatagagatatg

SEQ ID NO: 435 - DNA, 357 bp, Homo sapiens
  source 1..357: mol_type = genomic DNA
atgagccggagcgtggctctggccgtgctggccctattgtctctgagcggactggaagccatccagagaaccccaaagatccaagtgtacagcagacaccctgccgagaacggcaagagcaatttcctgaactgctacgtgtccggctttcaccccagcgacatcgaggtggatctgctgaagaacggcgagagaatcgagaaggtcgaacacagcgatctgagcttcagcgaagatggatccttctacctgctgtactacaccgagttcacccctacagagaaggacgagtacgcctgcagagtgaaccacgtgaccctgagccagcctaagatcgtgaagtgggatagagatatg

SEQ ID NO: 436 - protein, 458 aa, Homo sapiens
MNRGVPFRHLLLVLQLALLPAATQGKKVVLGKKGDTVELTCTASQKKSIQFHWKNSNQIKILGNQGSFLTKGPSKLNDRADSRRSLWDQGNFPLIIKNLKIEDSDTYICEVEDQKEEVQLLVFGLTANSDTHLLQGQSLTLTLESPPGSSPSVQCRSPRGKNIQGGKTLSVSQLELQDSGTWTCTVLQNQKKVEFKIDIVVLAFQKASSIVYKKEGEQVEFSFPLAFTVEKLTGSGELWWQAERASSSKSWITFDLKNKEVSVKRVTQDPKLQMGKKLPLHLTLPQALPQYAGSGNLTLALEAKTGKLHQEVNLVVMRATQLQKNLTCEVWGPTSPKLMLSLKLENKEAKVSKREKAVWVLNPEAGMWQCLLSDSGQVLLESNIKVLPTWSTPVQPMALIVLGGVAGLLLFIGLGIFFCVRCRHRRRQAERMSQIKRLLSEKKTCQCPHRFQKTCSPI

SEQ ID NO: 437 - protein, 26 aa, Homo sapiens
MALIVLGGVAGLLLFIGLGIFFCVRC

SEQ ID NO: 438 - protein, 247 aa, Homo sapiens [sequence omitted]

SEQ ID NO: 439 - protein, 144 aa, Homo sapiens [sequence omitted]

SEQ ID NO: 440 - protein, 280 aa, Homo sapiens [sequence omitted]

SEQ ID NO: 441 - protein, 341 aa, Homo sapiens
GSHSMRYFFTSVSRPGRGEPRFIAVGYVDDTQFVRFDSDAASQRMEPRAPWIEQEGPEYWDGETRKVKAHSQTHRVDLGTLRGYYNQSEAGSHTVQRMYGCDVGSDWRFLRGYHQYAYDGKDYIALKEDLRSWTAADMAAQTTKHKWEAAHVAEQLRAYLEGTCVEWLRRYLENGKETLQRTDAPKTHMTHHAVSDHEATLRCWALSFYPAEITLTWQRDGEDQTQDTELVETRPAGDGTFQKWAAVVVPSGQEQRYTCHVQHEGLPKPLTLRWEPSSQPTIPIVGIIAGLVLFGAVITGAVVAAVMWRRKSSDRKGGSYSQAASSDSAQGSDVSLTACKV

SEQ ID NO: 442 - protein, 341 aa, Homo sapiens
GSHSMRYFFTSVSRPGRGEPRFIAVGYVDDTQFVRFDSDAASQRMEPRAPWIEQEGPEYWDQETRNVKAQSQTDRVDLGTLRGYYNQSEAGSHTIQIMYGCDVGSDGRFLRGYRQDAYDGKDYIALNEDLRSWTAADMAAQITKRKWEAAHEAEQLRAYLDGTCVEWLRRYLENGKETLQRTDPPKTHMTHHPISDHEATLRCWALGFYPAEITLTWQRDGEDQTQDTELVETRPAGDGTFQKWAAVVVPSGEEQRYTCHVQHEGLPKPLTLRWELSSQPTIPIVGIIAGLVLLGAVITGAVVAAVMWRRKSSDRKGGSYTQAASSDSAQGSDVSLTACKV

SEQ ID NO: 443 - DNA, 843 bp, Homo sapiens
  source 1..843: mol_type = genomic DNA
atggccgtcatggcgccccgaaccctcgtcctgctactctcgggggctctggccctgacccagacctgggcgggctctcactccatgaggtatttcttcacatccgtgtcccggcccggccgcggggagccccgcttcatcgcagtgggctacgtggacgacacgcagttcgtgcggttcgacagcgacgccgcgagccagaggatggagccgcgggcgccgtggatagagcaggagggtccggagtattgggacggggagacacggaaagtgaaggcccactcacagactcaccgagtggacctggggaccctgcgcggctactacaaccagagcgaggccggttctcacaccgtccagaggatgtgtggctgcgacgtggggtcggactggcgcttcctccgcgggtaccaccagtacgcctacgacggcaaggattacatcgccctgaaagaggacctgcgctcttggaccgcggcggacatggcagctcagaccaccaagcacaagtgggaggcggcccatgtggcggagcagttgagagcctacctggagggcacgtgcgtggagtggctccgcagatacctggagaacgggaaggagacgctgcagcgcacggacgcccccaaaacgcatatgactcaccacgctgtctctgaccatgaagccaccctgaggtgctgggccctgagcttctaccctgcggagatcacactgacctggcagcgggatggggaggaccagacccaggacacggagctcgtggagaccaggcctgcaggggatggaaccttccagaagtgggcggctgtggtggtgccttctggacaggagcagagataa

SEQ ID NO: 444 - protein, 362 aa, Homo sapiens [sequence omitted]

SEQ ID NO: 445 - protein, 338 aa, Homo sapiens
GSHSMRYFYTAMSRPGRGEPRFIAVGYVDDTQFVRFDSDAASPRMAPRAPWIEQEGPEYWDGETRNMKASAQTYRENLRIALRYYNQSEAGSHIIQVMYGCDVGPDGRLLRGHDQSAYDGKDYIALNEDLSSWTAADTAAQITQRKWEAARVAEQLRAYLEGLCVEWLRRYLENGKETLQRADPPKTHVTHHPISDHEATLRCWALGFYPAEITLTWQRDGEDQTQDTELVETRPAGDRTFQKWAAVVVPSGEEQRYTCHVQHEGLPKPLTLRWEPSSQSTVPIVGIVAGLAVLAVVVIGAVVAAVMCRRKSSGGKGGSYSQAACSDSAQGSDVSLTA

SEQ ID NO: 446 - protein, 338 aa, Homo sapiens
GSHSMRYFYTAMSRPGRGEPRFITVGYVDDTLFVRFDSDATSPRKEPRAPWIEQEGPEYWDRETQISKTNTQTYRENLRTALRYYNQSEAGSHIIQRMYGCDVGPDGRLLRGYDQDAYDGKDYIALNEDLSSWTAADTAAQITQRKWEAARVAEQDRAYLEGLCVESLRRYLENGKETLQRADPPKTHVTHHPISDHEVTLRCWALGFYPAEITLTWQRDGEDQTQDTELVETRPAGDRTFQKWAAVVVPSGEEQRYTCHVQHEGLPKPLTLRWEPSSQSTVPIVGIVAGLAVLAVVVIGAVVAAVMCRRKSSGGKGGSYSQAACSDSAQGSDVSLTA

SEQ ID NO: 447 - DNA, 1089 bp, Homo sapiens
  source 1..1089: mol_type = genomic DNA
atgcgggtcacggcaccccgaaccgtcctcctgctgctctcggcggccctggccctgaccgagacctgggccggctcccactccatgaggtatttccacaccgccatgtcccggcccggccgcggggagccccgcttcatcaccgtgggctacgtggacgacacgctgttcgtgaggttcgacagcgacgccacgagtccgaggaaggagccgcgggcgccatggatagagcaggaggggccggagtattgggaccgggagacacagatctccaagaccaacacacagacttaccgagagagcctgcggaacctgcgcggctactacaaccagagcgaggccgggtctcacacttggcagaggatgtatggctgcgacctggggcccgacgggcgcctcctccgcgggtataaccagttagcctacgacggcaaggattacatcgccctgaacgaggacctgagctcctggaccgcggcggacaccgcggctcagatcacccagcgcaagtgggaggcggcccgtgtggcggagcaggacagagcctacctggagggcctgtgcgtggagtcgctccgcagatacctggagaacgggaaggagacgctgcagcgcgcggaccccccaaagacacatgtgacccaccaccccatctctgaccatgaggccaccctgaggtgctgggccctgggcttctaccctgcggagatcacactgacctggcagcgggatggcgaggaccaaactcaggacaccgagcttgtggagaccagaccagcaggagatagaaccttccagaagtgggcagctgtggtggtgccttctggagaagagcagagatacacatgccatgtacagcatgaggggctgccgaagcccctcaccctgagatgggagccatcttcccagtccaccatccccatcgtgggcattgttgctggcctggctgtcctagcagttgtggtcatcggagctgtggtcgctactgtgatgtgtaggaggaagagctcaggtggaaaaggagggagctactctcaggctgcgtccagcgacagtgcccagggctctgatgtgtctctcacagcttga

SEQ ID NO: 448 - protein, 366 aa, Homo sapiens [sequence omitted]

SEQ ID NO: 449 - protein, 342 aa, Homo sapiens
GSHSMRYFSTSVSWPGRGEPRFIAVGYVDDTQFVRFDSDAASPRGEPREPWVEQEGPEYWDRETQKYKRQAQADRVNLRKLRGYYNQSEDGSHTLQRMFGCDLGPDGRLLRGYNQFAYDGKDYIALNEDLRSWTAADTAAQITQRKWEAAREAEQRRAYLEGTCVEWLRRYLENGKETLQRAEHPKTHVTHHPVSDHEATLRCWALGFYPAEITLTWQWDGEDQTQDTELVETRPAGDGTFQKWAAVVVPSGEEQRYTCHVQHEGLPEPLTLRWKPSSQPTIPIVGIVAGLAVLAVLAVLGAMVAVVMCRRKSSGGKGGSCSQAASSNSAQGSDESLIACKA

SEQ ID NO: 450 - protein, 342 aa, Homo sapiens
CSHSMRYFYTAVSRPGRGEPRFIAVGYVDDTQFVQFDSDAASPRGEPRAPWVEQEGPEYWDRETQKYKRQAQTDRVNLRKLRGYYNQSEAGSHTLQRMYGCDLGPDGRLLRGYNQFAYDGKDYIALNEDLRSWTAADKAAQITQRKWEAAREAEQRRAYLEGTCVEWLRRYLENGKKTLQRAEHPKTHVTHHPVSDHEATLRCWALGFYPAEITLTWQRDGEDQTQDTELVETRPAGDGTFQKWAAVVVPSGEEQRYTCHVQHEGLPEPLTLRWGPSSQPTIPIVGIVAGLAVLAVLAVLGAVMAVVMCRRKSSGGKGGSCSQAASSNSAQGSDESLIACKA

SEQ ID NO: 451 - protein, 342 aa, Homo sapiens
CSHSMRYFDTAVSRPGRGEPRFISVGYVDDTQFVRFDSDAASPRGEPRAPWVEQEGPEYWDRETQKYKRQAQADRVSLRNLRGYYNQSEDGSHTLQRMSGCDLGPDGRLLRGYDQSAYDGKDYIALNEDLRSWTAADTAAQITQRKLEAARAAEQLRAYLEGTCVEWLRRYLENGKETLQRAEPPKTHVTHHPLSDHEATLRCWALGFYPAEITLTWQRDGEDQTQDTELVETRPAGDGTFQKWAAVVVPSGQEQRYTCHMQHEGLQEPLTLSWEPSSQPTIPIMGIVAGLAVLVVLAVLGAVVTAMMCRRKSSGGKGGSCSQAACSNSAQGSDESLITCKA

SEQ ID NO: 452 - DNA, 1101 bp, Homo sapiens
  source 1..1101: mol_type = genomic DNA
atgcgggtcatggcgccccgaaccctcatcctgctgctctcgggagccctggccctgaccgagacctgggcctgctcccactccatgaggtatttctacaccgccgtgtcccggcccggccgcggagagccccgcttcatcgcagtgggctacgtggacgacacgcagttcgtgcggttcgacagcgacgccgcgagtccaagaggggagccgcgggcgccgtgggtggagcaggaggggccggagtattgggaccgggagacacagaagtacaagcgccaggcacaggctgaccgagtgagcctgcggaacctgcgcggctactacaaccagagcgaggccgggtctcacaccctccagaggatgtacggctgcgacctggggcccgacgggcgcctcctccgcgggtatgaccagtccgcctacgacggcaaggattacatcgccctgaacgaggacctgcgctcctggaccgctgcggacacggcggctcagatcacccagcgcaagtgggaggcggcccgtgaggcggagcagtggagagcctacctggagggcacgtgcgtggagtggctccgcagatacctggagaacgggaaggagacgctgcagcgcgcggaacacccaaagacacacgtgacccaccatcccgtctctgaccatgaggccaccctgaggtgctgggccctgggcttctaccctgcggagatcacactgacctggcagcgggatggcgaggaccaaactcaggacaccgagcttgtggagaccaggccagcaggagatggaaccttccagaagtgggcagctgtggtggtgccttctggagaagagcagagatacacgtgccatgtgcagcacgaggggctgccagagcccctcaccctgagatgggagccatcttcccagcccaccatccccatcatgggcatcgttgctggcctggctgtcctggctgtcctagctgtcctaggagctgtgatggctgttgtgatgtgtaggaggaagagctcaggtggaaaaggagggagctgctctcaggctgcgtccagcaacagtgcccagggctctgatgagtctctcatcgcttgtaaagcctga

SEQ ID NO: 453 - protein, 233 aa, Homo sapiens
MSTESMIRDVELAEEALPKKTGGPQGSRRCLFLSLFSFLIVAGATTLFCLLHFGVIGPQREEFPRDLSLISPLAQAVRSSSRTPSDKPVAHVVANPQAEGQLQWLNRRANALLANGVELRDNQLVVPSEGLYLIYSQVLFKGQGCPSTHVLLTHTISRIAVSYQTKVNLLSAIKSPCQRETPEGAEAKPWYEPIYLGGVFQLEKGDRLSAEINRPDYLDFAESGQVYFGIIAL

SEQ ID NO: 454 - protein, 480 aa, synthetic construct
MSRSVALAVLALLSLSGLEAIQRTPKIQVYSRHPAENGKSNFLNCYVSGFHPSDIEVDLLKNGERIEKVEHSDLSFSKDWSFYLLYYTEFTPTEKDEYACRVNHVTLSQPKIVKWDRDMGGGGSGGGGSGGGGSGGGGSGSHSMRYFFTSVSRPGRGEPRFIAVGYVDDTQFVRFDSDAASQRMEPRAPWIEQEGPEYWDGETRKVKAHSQTHRVDLGTLRGYYNQSEAGSHTVQRMYGCDVGSDWRFLRGYHQYAYDGKDYIALKEDLRSWTAADMAAQTTKHKWEAAHVAEQLRAYLEGTCVEWLRRYLENGKETLQRTDAPKTHMTHHAVSDHEATLRCWALSFYPAEITLTWQRDGEDQTQDTELVETRPAGDGTFQKWAAVVVPSGQEQRYTCHVQHEGLPKPLTLRWEPSSQPTIPIVGIIAGLVLFGAVITGAVVAAVMWRRKSSDRKGGSYSQAASSDSAQGSDVSLTACKV

SEQ ID NO: 455 - protein, 480 aa, synthetic construct
MSRSVALAVLALLSLSGLEAIQRTPKIQVYSRHPAENGKSNFLNCYVSGFHPSDIEVDLLKNGERIEKVEHSDLSFSKDWSFYLLYYTEFTPTEKDEYACRVNHVTLSQPKIVKWDRDMGGGGSGGGGSGGGGSGGGGSGSHSMRYFFTSVSRPGRGEPRFIAVGYVDDTQFVRFDSDAASQRMEPRAPWIEQEGPEYWDGETRKVKAHSQTHRVDLGTLRGYYNQSEAGSHTVQRMYGCDVGSDWRFLRGYHQYAYDGKDYIALKEDLRSWTAADMAAQTTKHKWEAAHVAEQLRAYLEGTCVEWLRRYLENGKETLQRTDAPKTHMTHHAVSDHEATLRCWALSFYPAEITLTWQRDGEDQTQKAELVETRPAGDGTFQKWAAVVVPSGQEQRYTCHVQHEGLPKPLTLRWEPSSQPTIPIVGIIAGLVLFGAVITGAVVAAVMWRRKSSDRKGGSYSQAASSDSAQGSDVSLTACKV

SEQ ID NO: 456 - protein, 480 aa, synthetic construct
MSRSVALAVLALLSLSGLEAIQRTPKIQVYSRHPAENGKSNFLNCYVSGFHPSDIEVDLLKNGERIEKVEHSDLSFSKDWSFYLLYYTEFTPTEKDEYACRVNHVTLSQPKIVKWDRDMGGGGSGGGGSGGGGSGGGGSGSHSMRYFFTSVSRPGRGEPRFIAVGYVDDTQFVRFDSDAASQRMEPRAPWIEQEGPEYWDGETRKVKAHSQTHRVDLGTLRGYYNQSEAGSHTVQRMYGCDVGSDWRFLRGYHQYAYDGKDYIALKEDLRSWTAADMAAQTTKHKWEAAHVAEQLRAYLEGTCVEWLRRYLENGKETLQRTDAPKTHMTHHAVSDHEATLRCWALSFYPAEITLTWQRDGEDQTQDTELVETRPAGDGTFQKWVAVVVPSGQEQRYTCHVQHEGLPKPLTLRWEPSSQPTIPIVGIIAGLVLFGAVITGAVVAAVMWRRKSSDRKGGSYSQAASSDSAQGSDVSLTACKV

SEQ ID NO: 457 - protein, 480 aa, synthetic construct
MSRSVALAVLALLSLSGLEAIQRTPKIQVYSRHPAENGKSNFLNCYVSGFHPSDIEVDLLKNGERIEKVEHSDLSFSKDWSFYLLYYTEFTPTEKDEYACRVNHVTLSQPKIVKWDRDMGGGGSGGGGSGGGGSGGGGSGSHSMRYFFTSVSRPGRGEPRFIAVGYVDDTQFVRFDSDAASQRMEPRAPWIEQEGPEYWDGETRKVKAHSQTHRVDLGTLRGYYNQSEAGSHTVQRMYGCDVGSDWRFLRGYHQYAYDGKDYIALKEDLRSWTAADMAAQTTKHKWEAAHVAEQLRAYLEGTCVEWLRRYLENGKETLQRTDAPKTHMTHHAVSDHEATLRCWALSFYPAEITLTWQRDGEDQTQKAELVETRPAGDGTFQKWVAVVVPSGQEQRYTCHVQHEGLPKPLTLRWEPSSQPTIPIVGIIAGLVLFGAVITGAVVAAVMWRRKSSDRKGGSYSQAASSDSAQGSDVSLTACKV

SEQ ID NO: 458 - protein, 480 aa, synthetic construct
MSRSVALAVLALLSLSGLEAIQRTPKIQVYSRHPAENGKSNFLNCYVSGFHPSDIEVDLLKNGERIEKVEHSDLSFSEDWSFYLLYYTEFTPTEKDEYACRVNHVTLSQPKIVKWDRDMGGGGSGGGGSGGGGSGGGGSGSHSMRYFFTSVSRPGRGEPRFIAVGYVDDTQFVRFDSDAASQRMEPRAPWIEQEGPEYWDGETRKVKAHSQTHRVDLGTLRGYYNQSEAGSHTVQRMYGCDVGSDWRFLRGYHQYAYDGKDYIALKEDLRSWTAADMAAQTTKHKWEAAHVAEQLRAYLEGTCVEWLRRYLENGKETLQRTDAPKTHMTHHAVSDHEATLRCWALSFYPAEITLTWQRDGEDQTQDTELVETRPAGDGTFQKWAAVVVPSGQEQRYTCHVQHEGLPKPLTLRWEPSSQPTIPIVGIIAGLVLFGAVITGAVVAAVMWRRKSSDRKGGSYSQAASSDSAQGSDVSLTACKV

SEQ ID NO: 459 - protein, 480 aa, synthetic construct
MSRSVALAVLALLSLSGLEAIQRTPKIQVYSRHPAENGKSNFLNCYVSGFHPSDIEVDLLKNGERIEKVEHSDLSFSEDWSFYLLYYTEFTPTEKDEYACRVNHVTLSQPKIVKWDRDMGGGGSGGGGSGGGGSGGGGSGSHSMRYFFTSVSRPGRGEPRFIAVGYVDDTQFVRFDSDAASQRMEPRAPWIEQEGPEYWDGETRKVKAHSQTHRVDLGTLRGYYNQSEAGSHTVQRMYGCDVGSDWRFLRGYHQYAYDGKDYIALKEDLRSWTAADMAAQTTKHKWEAAHVAEQLRAYLEGTCVEWLRRYLENGKETLQRTDAPKTHMTHHAVSDHEATLRCWALSFYPAEITLTWQRDGEDQTQKAELVETRPAGDGTFQKWAAVVVPSGQEQRYTCHVQHEGLPKPLTLRWEPSSQPTIPIVGIIAGLVLFGAVITGAVVAAVMWRRKSSDRKGGSYSQAASSDSAQGSDVSLTACKV

SEQ ID NO: 460 - protein, 480 aa, synthetic construct
MSRSVALAVLALLSLSGLEAIQRTPKIQVYSRHPAENGKSNFLNCYVSGFHPSDIEVDLLKNGERIEKVEHSDLSFSEDWSFYLLYYTEFTPTEKDEYACRVNHVTLSQPKIVKWDRDMGGGGSGGGGSGGGGSGGGGSGSHSMRYFFTSVSRPGRGEPRFIAVGYVDDTQFVRFDSDAASQRMEPRAPWIEQEGPEYWDGETRKVKAHSQTHRVDLGTLRGYYNQSEAGSHTVQRMYGCDVGSDWRFLRGYHQYAYDGKDYIALKEDLRSWTAADMAAQTTKHKWEAAHVAEQLRAYLEGTCVEWLRRYLENGKETLQRTDAPKTHMTHHAVSDHEATLRCWALSFYPAEITLTWQRDGEDQTQDTELVETRPAGDGTFQKWVAVVVPSGQEQRYTCHVQHEGLPKPLTLRWEPSSQPTIPIVGIIAGLVLFGAVITGAVVAAVMWRRKSSDRKGGSYSQAASSDSAQGSDVSLTACKV

SEQ ID NO: 461 - protein, 480 aa, synthetic construct
MSRSVALAVLALLSLSGLEAIQRTPKIQVYSRHPAENGKSNFLNCYVSGFHPSDIEVDLLKNGERIEKVEHSDLSFSEDWSFYLLYYTEFTPTEKDEYACRVNHVTLSQPKIVKWDRDMGGGGSGGGGSGGGGSGGGGSGSHSMRYFFTSVSRPGRGEPRFIAVGYVDDTQFVRFDSDAASQRMEPRAPWIEQEGPEYWDGETRKVKAHSQTHRVDLGTLRGYYNQSEAGSHTVQRMYGCDVGSDWRFLRGYHQYAYDGKDYIALKEDLRSWTAADMAAQTTKHKWEAAHVAEQLRAYLEGTCVEWLRRYLENGKETLQRTDAPKTHMTHHAVSDHEATLRCWALSFYPAEITLTWQRDGEDQTQKAELVETRPAGDGTFQKWVAVVVPSGQEQRYTCHVQHEGLPKPLTLRWEPSSQPTIPIVGIIAGLVLFGAVITGAVVAAVMWRRKSSDRKGGSYSQAASSDSAQGSDVSLTACKV

SEQ ID NO: 462 - protein, 449 aa, synthetic construct
MSRSVALAVLALLSLSGLEAIQRTPKIQVYSRHPAENGKSNFLNCYVSGFHPSDIEVDLLKNGERIEKVEHSDLSFSKDWSFYLLYYTEFTPTEKDEYACRVNHVTLSQPKIVKWDRDMGGGGSGGGGSGGGGSGGGGSGSHSMRYFFTSVSRPGRGEPRFIAVGYVDDTQFVRFDSDAASQRMEPRAPWIEQEGPEYWDGETRKVKAHSQTHRVDLGTLRGYYNQSEAGSHTVQRMYGCDVGSDWRFLRGYHQYAYDGKDYIALKEDLRSWTAADMAAQTTKHKWEAAHVAEQLRAYLEGTCVEWLRRYLENGKETLQRTDAPKTHMTHHAVSDHEATLRCWALSFYPAEITLTWQRDGEDQTQDTELVETRPAGDGTFQKWAAVVVPSGQEQRYTCHVQHEGLPKPLTLRWEPSSQPTIPIMALIVLGGVAGLLLFIGLGIFFCVRC

SEQ ID NO: 463 - protein, 449 aa, synthetic construct
MSRSVALAVLALLSLSGLEAIQRTPKIQVYSRHPAENGKSNFLNCYVSGFHPSDIEVDLLKNGERIEKVEHSDLSFSKDWSFYLLYYTEFTPTEKDEYACRVNHVTLSQPKIVKWDRDMGGGGSGGGGSGGGGSGGGGSGSHSMRYFFTSVSRPGRGEPRFIAVGYVDDTQFVRFDSDAASQRMEPRAPWIEQEGPEYWDGETRKVKAHSQTHRVDLGTLRGYYNQSEAGSHTVQRMYGCDVGSDWRFLRGYHQYAYDGKDYIALKEDLRSWTAADMAAQTTKHKWEAAHVAEQLRAYLEGTCVEWLRRYLENGKETLQRTDAPKTHMTHHAVSDHEATLRCWALSFYPAEITLTWQRDGEDQTQKAELVETRPAGDGTFQKWAAVVVPSGQEQRYTCHVQHEGLPKPLTLRWEPSSQPTIPIMALIVLGGVAGLLLFIGLGIFFCVRC

SEQ ID NO: 464 - protein, 449 aa, synthetic construct
MSRSVALAVLALLSLSGLEAIQRTPKIQVYSRHPAENGKSNFLNCYVSGFHPSDIEVDLLKNGERIEKVEHSDLSFSKDWSFYLLYYTEFTPTEKDEYACRVNHVTLSQPKIVKWDRDMGGGGSGGGGSGGGGSGGGGSGSHSMRYFFTSVSRPGRGEPRFIAVGYVDDTQFVRFDSDAASQRMEPRAPWIEQEGPEYWDGETRKVKAHSQTHRVDLGTLRGYYNQSEAGSHTVQRMYGCDVGSDWRFLRGYHQYAYDGKDYIALKEDLRSWTAADMAAQTTKHKWEAAHVAEQLRAYLEGTCVEWLRRYLENGKETLQRTDAPKTHMTHHAVSDHEATLRCWALSFYPAEITLTWQRDGEDQTQDTELVETRPAGDGTFQKWVAVVVPSGQEQRYTCHVQHEGLPKPLTLRWEPSSQPTIPIMALIVLGGVAGLLLFIGLGIFFCVRC

SEQ ID NO: 465 - protein, 449 aa, synthetic construct
MSRSVALAVLALLSLSGLEAIQRTPKIQVYSRHPAENGKSNFLNCYVSGFHPSDIEVDLLKNGERIEKVEHSDLSFSKDWSFYLLYYTEFTPTEKDEYACRVNHVTLSQPKIVKWDRDMGGGGSGGGGSGGGGSGGGGSGSHSMRYFFTSVSRPGRGEPRFIAVGYVDDTQFVRFDSDAASQRMEPRAPWIEQEGPEYWDGETRKVKAHSQTHRVDLGTLRGYYNQSEAGSHTVQRMYGCDVGSDWRFLRGYHQYAYDGKDYIALKEDLRSWTAADMAAQTTKHKWEAAHVAEQLRAYLEGTCVEWLRRYLENGKETLQRTDAPKTHMTHHAVSDHEATLRCWALSFYPAEITLTWQRDGEDQTQKAELVETRPAGDGTFQKWVAVVVPSGQEQRYTCHVQHEGLPKPLTLRWEPSSQPTIPIMALIVLGGVAGLLLFIGLGIFFCVRC

SEQ ID NO: 466 - protein, 449 aa, synthetic construct
MSRSVALAVLALLSLSGLEAIQRTPKIQVYSRHPAENGKSNFLNCYVSGFHPSDIEVDLLKNGERIEKVEHSDLSFSEDWSFYLLYYTEFTPTEKDEYACRVNHVTLSQPKIVKWDRDMGGGGSGGGGSGGGGSGGGGSGSHSMRYFFTSVSRPGRGEPRFIAVGYVDDTQFVRFDSDAASQRMEPRAPWIEQEGPEYWDGETRKVKAHSQTHRVDLGTLRGYYNQSEAGSHTVQRMYGCDVGSDWRFLRGYHQYAYDGKDYIALKEDLRSWTAADMAAQTTKHKWEAAHVAEQLRAYLEGTCVEWLRRYLENGKETLQRTDAPKTHMTHHAVSDHEATLRCWALSFYPAEITLTWQRDGEDQTQDTELVETRPAGDGTFQKWAAVVVPSGQEQRYTCHVQHEGLPKPLTLRWEPSSQPTIPIMALIVLGGVAGLLLFIGLGIFFCVRC

SEQ ID NO: 467 - protein, 449 aa, synthetic construct
MSRSVALAVLALLSLSGLEAIQRTPKIQVYSRHPAENGKSNFLNCYVSGFHPSDIEVDLLKNGERIEKVEHSDLSFSEDWSFYLLYYTEFTPTEKDEYACRVNHVTLSQPKIVKWDRDMGGGGSGGGGSGGGGSGGGGSGSHSMRYFFTSVSRPGRGEPRFIAVGYVDDTQFVRFDSDAASQRMEPRAPWIEQEGPEYWDGETRKVKAHSQTHRVDLGTLRGYYNQSEAGSHTVQRMYGCDVGSDWRFLRGYHQYAYDGKDYIALKEDLRSWTAADMAAQTTKHKWEAAHVAEQLRAYLEGTCVEWLRRYLENGKETLQRTDAPKTHMTHHAVSDHEATLRCWALSFYPAEITLTWQRDGEDQTQKAELVETRPAGDGTFQKWAAVVVPSGQEQRYTCHVQHEGLPKPLTLRWEPSSQPTIPIMALIVLGGVAGLLLFIGLGIFFCVRC

SEQ ID NO: 468 - protein, 449 aa, synthetic construct
MSRSVALAVLALLSLSGLEAIQRTPKIQVYSRHPAENGKSNFLNCYVSGFHPSDIEVDLLKNGERIEKVEHSDLSFSEDWSFYLLYYTEFTPTEKDEYACRVNHVTLSQPKIVKWDRDMGGGGSGGGGSGGGGSGGGGSGSHSMRYFFTSVSRPGRGEPRFIAVGYVDDTQFVRFDSDAASQRMEPRAPWIEQEGPEYWDGETRKVKAHSQTHRVDLGTLRGYYNQSEAGSHTVQRMYGCDVGSDWRFLRGYHQYAYDGKDYIALKEDLRSWTAADMAAQTTKHKWEAAHVAEQLRAYLEGTCVEWLRRYLENGKETLQRTDAPKTHMTHHAVSDHEATLRCWALSFYPAEITLTWQRDGEDQTQDTELVETRPAGDGTFQKWVAVVVPSGQEQRYTCHVQHEGLPKPLTLRWEPSSQPTIPIMALIVLGGVAGLLLFIGLGIFFCVRC

SEQ ID NO: 469 - protein, 449 aa, synthetic construct
MSRSVALAVLALLSLSGLEAIQRTPKIQVYSRHPAENGKSNFLNCYVSGFHPSDIEVDLLKNGERIEKVEHSDLSFSEDWSFYLLYYTEFTPTEKDEYACRVNHVTLSQPKIVKWDRDMGGGGSGGGGSGGGGSGGGGSGSHSMRYFFTSVSRPGRGEPRFIAVGYVDDTQFVRFDSDAASQRMEPRAPWIEQEGPEYWDGETRKVKAHSQTHRVDLGTLRGYYNQSEAGSHTVQRMYGCDVGSDWRFLRGYHQYAYDGKDYIALKEDLRSWTAADMAAQTTKHKWEAAHVAEQLRAYLEGTCVEWLRRYLENGKETLQRTDAPKTHMTHHAVSDHEATLRCWALSFYPAEITLTWQRDGEDQTQKAELVETRPAGDGTFQKWVAVVVPSGQEQRYTCHVQHEGLPKPLTLRWEPSSQPTIPIMALIVLGGVAGLLLFIGLGIFFCVRC

SEQ ID NO: 470 - protein, 481 aa, synthetic construct
MSRSVALAVLALLSLSGLEAIQRTPKIQVYSRHPAENGKSNFLNCYVSGFHPSDIEVDLLKNGERIEKVEHSDLSFSKDWSFYLLYYTEFTPTEKDEYACRVNHVTLSQPKIVKWDRDMGGGGSGGGGSGGGGSGGGGSGSHSMRYFYTAVSRPGRGEPRFIAVGYVDDTQFVQFDSDAASPRGEPRAPWVEQEGPEYWDRETQKYKRQAQTDRVNLRKLRGYYNQSEAGSHTLQRMYGCDLGPDGRLLRGYNQFAYDGKDYIALNEDLRSWTAADKAAQITQRKWEAAREAEQRRAYLEGTCVEWLRRYLENGKKTLQRAEHPKTHVTHHPVSDHEATLRCWALGFYPAEITLTWQRDGEDQTQDTELVETRPAGDGTFQKWAAVVVPSGEEQRYTCHVQHEGLPEPLTLRWGPSSQPTIPIVGIVAGLAVLAVLAVLGAVMAVVMCRRKSSGGKGGSCSQAASSNSAQGSDESLIACKA

SEQ ID NO: 471 - protein, 449 aa, synthetic construct
MSRSVALAVLALLSLSGLEAIQRTPKIQVYSRHPAENGKSNFLNCYVSGFHPSDIEVDLLKNGERIEKVEHSDLSFSKDWSFYLLYYTEFTPTEKDEYACRVNHVTLSQPKIVKWDRDMGGGGSGGGGSGGGGSGGGGSGSHSMRYFYTAVSRPGRGEPRFIAVGYVDDTQFVQFDSDAASPRGEPRAPWVEQEGPEYWDRETQKYKRQAQTDRVNLRKLRGYYNQSEAGSHTLQRMYGCDLGPDGRLLRGYNQFAYDGKDYIALNEDLRSWTAADKAAQITQRKWEAAREAEQRRAYLEGTCVEWLRRYLENGKKTLQRAEHPKTHVTHHPVSDHEATLRCWALGFYPAEITLTWQRDGEDQTQDTELVETRPAGDGTFQKWAAVVVPSGEEQRYTCHVQHEGLPEPLTLRWGPSSQPTIPIMALIVLGGVAGLLLFIGLGIFFCVRC

SEQ ID NO: 472 - protein, 481 aa, synthetic construct
MSRSVALAVLALLSLSGLEAIQRTPKIQVYSRHPAENGKSNFLNCYVSGFHPSDIEVDLLKNGERIEKVEHSDLSFSKDWSFYLLYYTEFTPTEKDEYACRVNHVTLSQPKIVKWDRDMGGGGSGGGGSGGGGSGGGGSGSHSMRYFSTSVSWPGRGEPRFIAVGYVDDTQFVRFDSDAASPRGEPREPWVEQEGPEYWDRETQKYKRQAQADRVNLRKLRGYYNQSEDGSHTLQRMFGCDLGPDGRLLRGYNQFAYDGKDYIALNEDLRSWTAADTAAQITQRKWEAAREAEQRRAYLEGTCVEWLRRYLENGKETLQRAEHPKTHVTHHPVSDHEATLRCWALGFYPAEITLTWQWDGEDQTQDTELVETRPAGDGTFQKWAAVVVPSGEEQRYTCHVQHEGLPEPLTLRWKPSSQPTIPIVGIVAGLAVLAVLAVLGAMVAVVMCRRKSSGGKGGSCSQAASSNSAQGSDESLIACKA

SEQ ID NO: 473 - protein, 445 aa, synthetic construct
MSRSVALAVLALLSLSGLEAIQRTPKIQVYSRHPAENGKSNFLNCYVSGFHPSDIEVDLLKNGERIEKVEHSDLSFSKDWSFYLLYYTEFTPTEKDEYACRVNHVTLSQPKIVKWDRDMGGGGSGGGGSGGGGSGGGGSGSHSMRYFSTSVSWPGRGEPRFIAVGYVDDTQFVRFDSDAASPRGEPREPWVEQEGPEYWDRETQKYKRQAQADRVNLRKLRGYYNQSEDGSHTLQRMFGCDLGPDGRLLRGYNQFAYDGKDYIALNEDLRSWTAADTAAQITQRKWEAAREAEQRRAYLEGTCVEWLRRYLENGKETLQRAEHPKTHVTHHPVSDHEATLRCWALGFYPAEITLTWQWDGEDQTQDTELVETRPAGDGTFQKWAAVVVPSGEEQRYTCHVQHEGLPEPLTLRWKPSSQPTIPIMALIVLGGVAGLLLFIGLGIFF

SEQ ID NO: 474 - protein, 505 aa, synthetic construct
MSRSVALAVLALLSLSGLEAQYDDAVYKLGGGGSGGGGSGGGGSIQRTPKIQVYSRHPAENGKSNFLNCYVSGFHPSDIEVDLLKNGERIEKVEHSDLSFSKDWSFYLLYYTEFTPTEKDEYACRVNHVTLSQPKIVKWDRDMGGGGSGGGGSGGGGSGGGGSGSHSMRYFSTSVSWPGRGEPRFIAVGYVDDTQFVRFDSDAASPRGEPREPWVEQEGPEYWDRETQKYKRQAQADRVNLRKLRGYYNQSEDGSHTLQRMFGCDLGPDGRLLRGYNQFAYDGKDYIALNEDLRSWTAADTAAQITQRKWEAAREAEQRRAYLEGTCVEWLRRYLENGKETLQRAEHPKTHVTHHPVSDHEATLRCWALGFYPAEITLTWQWDGEDQTQDTELVETRPAGDGTFQKWAAVVVPSGEEQRYTCHVQHEGLPEPLTLRWKPSSQPTIPIVGIVAGLAVLAVLAVLGAMVAVVMCRRKSSGGKGGSCSQAASSNSAQGSDESLIACKA

SEQ ID NO: 475 - protein, 473 aa, synthetic construct
MSRSVALAVLALLSLSGLEAQYDDAVYKLGGGGSGGGGSGGGGSIQRTPKIQVYSRHPAENGKSNFLNCYVSGFHPSDIEVDLLKNGERIEKVEHSDLSFSKDWSFYLLYYTEFTPTEKDEYACRVNHVTLSQPKIVKWDRDMGGGGSGGGGSGGGGSGGGGSGSHSMRYFSTSVSWPGRGEPRFIAVGYVDDTQFVRFDSDAASPRGEPREPWVEQEGPEYWDRETQKYKRQAQADRVNLRKLRGYYNQSEDGSHTLQRMFGCDLGPDGRLLRGYNQFAYDGKDYIALNEDLRSWTAADTAAQITQRKWEAAREAEQRRAYLEGTCVEWLRRYLENGKETLQRAEHPKTHVTHHPVSDHEATLRCWALGFYPAEITLTWQWDGEDQTQDTELVETRPAGDGTFQKWAAVVVPSGEEQRYTCHVQHEGLPEPLTLRWKPSSQPTIPIMALIVLGGVAGLLLFIGLGIFFCVRC

SEQ ID NO: 476 - protein, 481 aa, synthetic construct
MSRSVALAVLALLSLSGLEAIQRTPKIQVYSRHPAENGKSNFLNCYVSGFHPSDIEVDLLKNGERIEKVEHSDLSFSKDWSFYLLYYTEFTPTEKDEYACRVNHVTLSQPKIVKWDRDMGGGGSGGGGSGGGGSGGGGSGSHSMRYFDTAVSRPGRGEPRFISVGYVDDTQFVRFDSDAASPRGEPRAPWVEQEGPEYWDRETQKYKRQAQADRVSLRNLRGYYNQSEDGSHTLQRMSGCDLGPDGRLLRGYDQSAYDGKDYIALNEDLRSWTAADTAAQITQRKLEAARAAEQLRAYLEGTCVEWLRRYLENGKETLQRAEPPKTHVTHHPLSDHEATLRCWALGFYPAEITLTWQRDGEDQTQDTELVETRPAGDGTFQKWAAVVVPSGQEQRYTCHMQHEGLQEPLTLSWEPSSQPTIPIMGIVAGLAVLVVLAVLGAVVTAMMCRRKSSGGKGGSCSQAACSNSAQGSDESLITCKA

SEQ ID NO: 477 - protein, 449 aa, synthetic construct
MSRSVALAVLALLSLSGLEAIQRTPKIQVYSRHPAENGKSNFLNCYVSGFHPSDIEVDLLKNGERIEKVEHSDLSFSKDWSFYLLYYTEFTPTEKDEYACRVNHVTLSQPKIVKWDRDMGGGGSGGGGSGGGGSGGGGSGSHSMRYFDTAVSRPGRGEPRFISVGYVDDTQFVRFDSDAASPRGEPRAPWVEQEGPEYWDRETQKYKRQAQADRVSLRNLRGYYNQSEDGSHTLQRMSGCDLGPDGRLLRGYDQSAYDGKDYIALNEDLRSWTAADTAAQITQRKLEAARAAEQLRAYLEGTCVEWLRRYLENGKETLQRAEPPKTHVTHHPLSDHEATLRCWALGFYPAEITLTWQRDGEDQTQDTELVETRPAGDGTFQKWAAVVVPSGQEQRYTCHMQHEGLQEPLTLSWEPSSQPTIPIMALIVLGGVAGLLLFIGLGIFFCVRC

SEQ ID NO: 478 - protein, 505 aa, synthetic construct
MSRSVALAVLALLSLSGLEARYRPGTVALGGGGSGGGGSGGGGSIQRTPKIQVYSRHPAENGKSNFLNCYVSGFHPSDIEVDLLKNGERIEKVEHSDLSFSKDWSFYLLYYTEFTPTEKDEYACRVNHVTLSQPKIVKWDRDMGGGGSGGGGSGGGGSGGGGSGSHSMRYFDTAVSRPGRGEPRFISVGYVDDTQFVRFDSDAASPRGEPRAPWVEQEGPEYWDRETQKYKRQAQADRVSLRNLRGYYNQSEDGSHTLQRMSGCDLGPDGRLLRGYDQSAYDGKDYIALNEDLRSWTAADTAAQITQRKLEAARAAEQLRAYLEGTCVEWLRRYLENGKETLQRAEPPKTHVTHHPLSDHEATLRCWALGFYPAEITLTWQRDGEDQTQDTELVETRPAGDGTFQKWAAVVVPSGQEQRYTCHMQHEGLQEPLTLSWEPSSQPTIPIMGIVAGLAVLVVLAVLGAVVTAMMCRRKSSGGKGGSCSQAACSNSAQGSDESLITCKA

SEQ ID NO: 479 - protein, 473 aa, synthetic construct
MSRSVALAVLALLSLSGLEARYRPGTVALGGGGSGGGGSGGGGSIQRTPKIQVYSRHPAENGKSNFLNCYVSGFHPSDIEVDLLKNGERIEKVEHSDLSFSKDWSFYLLYYTEFTPTEKDEYACRVNHVTLSQPKIVKWDRDMGGGGSGGGGSGGGGSGGGGSGSHSMRYFDTAVSRPGRGEPRFISVGYVDDTQFVRFDSDAASPRGEPRAPWVEQEGPEYWDRETQKYKRQAQADRVSLRNLRGYYNQSEDGSHTLQRMSGCDLGPDGRLLRGYDQSAYDGKDYIALNEDLRSWTAADTAAQITQRKLEAARAAEQLRAYLEGTCVEWLRRYLENGKETLQRAEPPKTHVTHHPLSDHEATLRCWALGFYPAEITLTWQRDGEDQTQDTELVETRPAGDGTFQKWAAVVVPSGQEQRYTCHMQHEGLQEPLTLSWEPSSQPTIPIMALIVLGGVAGLLLFIGLGIFFCVRC

SEQ ID NO: 480 - protein, 477 aa, synthetic construct
MSRSVALAVLALLSLSGLEAIQRTPKIQVYSRHPAENGKSNFLNCYVSGFHPSDIEVDLLKNGERIEKVEHSDLSFSKDWSFYLLYYTEFTPTEKDEYACRVNHVTLSQPKIVKWDRDMGGGGSGGGGSGGGGSGGGGSGSHSMRYFYTAMSRPGRGEPRFIAVGYVDDTQFVRFDSDAASPRMAPRAPWIEQEGPEYWDGETRNMKASAQTYRENLRIALRYYNQSEAGSHIIQVMYGCDVGPDGRLLRGHDQSAYDGKDYIALNEDLSSWTAADTAAQITQRKWEAARVAEQLRAYLEGLCVEWLRRYLENGKETLQRADPPKTHVTHHPISDHEATLRCWALGFYPAEITLTWQRDGEDQTQDTELVETRPAGDRTFQKWAAVVVPSGEEQRYTCHVQHEGLPKPLTLRWEPSSQSTVPIVGIVAGLAVLAVVVIGAVVAAVMCRRKSSGGKGGSYSQAACSDSAQGSDVSLTA

SEQ ID NO: 481 - protein, 449 aa, synthetic construct
MSRSVALAVLALLSLSGLEAIQRTPKIQVYSRHPAENGKSNFLNCYVSGFHPSDIEVDLLKNGERIEKVEHSDLSFSKDWSFYLLYYTEFTPTEKDEYACRVNHVTLSQPKIVKWDRDMGGGGSGGGGSGGGGSGGGGSGSHSMRYFYTAMSRPGRGEPRFIAVGYVDDTQFVRFDSDAASPRMAPRAPWIEQEGPEYWDGETRNMKASAQTYRENLRIALRYYNQSEAGSHIIQVMYGCDVGPDGRLLRGHDQSAYDGKDYIALNEDLSSWTAADTAAQITQRKWEAARVAEQLRAYLEGLCVEWLRRYLENGKETLQRADPPKTHVTHHPISDHEATLRCWALGFYPAEITLTWQRDGEDQTQDTELVETRPAGDRTFQKWAAVVVPSGEEQRYTCHVQHEGLPKPLTLRWEPSSQSTVPIMALIVLGGVAGLLLFIGLGIFFCVRC

SEQ ID NO: 482 - protein, 501 aa, synthetic construct
MSRSVALAVLALLSLSGLEALSSPVTKSFGGGGSGGGGSGGGGSIQRTPKIQVYSRHPAENGKSNFLNCYVSGFHPSDIEVDLLKNGERIEKVEHSDLSFSKDWSFYLLYYTEFTPTEKDEYACRVNHVTLSQPKIVKWDRDMGGGGSGGGGSGGGGSGGGGSGSHSMRYFYTAMSRPGRGEPRFIAVGYVDDTQFVRFDSDAASPRMAPRAPWIEQEGPEYWDGETRNMKASAQTYRENLRIALRYYNQSEAGSHIIQVMYGCDVGPDGRLLRGHDQSAYDGKDYIALNEDLSSWTAADTAAQITQRKWEAARVAEQLRAYLEGLCVEWLRRYLENGKETLQRADPPKTHVTHHPISDHEATLRCWALGFYPAEITLTWQRDGEDQTQDTELVETRPAGDRTFQKWAAVVVPSGEEQRYTCHVQHEGLPKPLTLRWEPSSQSTVPIVGIVAGLAVLAVVVIGAVVAAVMCRRKSSGGKGGSYSQAACSDSAQGSDVSLTA

SEQ ID NO: 483 - protein, 473 aa, synthetic construct
MSRSVALAVLALLSLSGLEALSSPVTKSFGGGGSGGGGSGGGGSIQRTPKIQVYSRHPAENGKSNFLNCYVSGFHPSDIEVDLLKNGERIEKVEHSDLSFSKDWSFYLLYYTEFTPTEKDEYACRVNHVTLSQPKIVKWDRDMGGGGSGGGGSGGGGSGGGGSGSHSMRYFYTAMSRPGRGEPRFIAVGYVDDTQFVRFDSDAASPRMAPRAPWIEQEGPEYWDGETRNMKASAQTYRENLRIALRYYNQSEAGSHIIQVMYGCDVGPDGRLLRGHDQSAYDGKDYIALNEDLSSWTAADTAAQITQRKWEAARVAEQLRAYLEGLCVEWLRRYLENGKETLQRADPPKTHVTHHPISDHEATLRCWALGFYPAEITLTWQRDGEDQTQDTELVETRPAGDRTFQKWAAVVVPSGEEQRYTCHVQHEGLPKPLTLRWEPSSQSTVPIMALIVLGGVAGLLLFIGLGIFFCVRC

SEQ ID NO: 484 - protein, 477 aa, synthetic construct
MSRSVALAVLALLSLSGLEAIQRTPKIQVYSRHPAENGKSNFLNCYVSGFHPSDIEVDLLKNGERIEKVEHSDLSFSKDWSFYLLYYTEFTPTEKDEYACRVNHVTLSQPKIVKWDRDMGGGGSGGGGSGGGGSGGGGSGSHSMRYFYTAMSRPGRGEPRFITVGYVDDTLFVRFDSDATSPRKEPRAPWIEQEGPEYWDRETQISKTNTQTYRENLRTALRYYNQSEAGSHIIQRMYGCDVGPDGRLLRGYDQDAYDGKDYIALNEDLSSWTAADTAAQITQRKWEAARVAEQDRAYLEGLCVESLRRYLENGKETLQRADPPKTHVTHHPISDHEVTLRCWALGFYPAEITLTWQRDGEDQTQDTELVETRPAGDRTFQKWAAVVVPSGEEQRYTCHVQHEGLPKPLTLRWEPSSQSTVPIVGIVAGLAVLAVVVIGAVVAAVMCRRKSSGGKGGSYSQAACSDSAQGSDVSLTA

SEQ ID NO: 485 - protein, 449 aa, synthetic construct
MSRSVALAVLALLSLSGLEAIQRTPKIQVYSRHPAENGKSNFLNCYVSGFHPSDIEVDLLKNGERIEKVEHSDLSFSKDWSFYLLYYTEFTPTEKDEYACRVNHVTLSQPKIVKWDRDMGGGGSGGGGSGGGGSGGGGSGSHSMRYFYTAMSRPGRGEPRFITVGYVDDTLFVRFDSDATSPRKEPRAPWIEQEGPEYWDRETQISKTNTQTYRENLRTALRYYNQSEAGSHIIQRMYGCDVGPDGRLLRGYDQDAYDGKDYIALNEDLSSWTAADTAAQITQRKWEAARVAEQDRAYLEGLCVESLRRYLENGKETLQRADPPKTHVTHHPISDHEVTLRCWALGFYPAEITLTWQRDGEDQTQDTELVETRPAGDRTFQKWAAVVVPSGEEQRYTCHVQHEGLPKPLTLRWEPSSQSTVPIMALIVLGGVAGLLLFIGLGIFFCVRC

SEQ ID NO: 486 - protein, 502 aa, synthetic construct
MSRSVALAVLALLSLSGLEAEEVHDLERKYGGGGSGGGGSGGGGSIQRTPKIQVYSRHPAENGKSNFLNCYVSGFHPSDIEVDLLKNGERIEKVEHSDLSFSKDWSFYLLYYTEFTPTEKDEYACRVNHVTLSQPKIVKWDRDMGGGGSGGGGSGGGGSGGGGSGSHSMRYFYTAMSRPGRGEPRFITVGYVDDTLFVRFDSDATSPRKEPRAPWIEQEGPEYWDRETQISKTNTQTYRENLRTALRYYNQSEAGSHIIQRMYGCDVGPDGRLLRGYDQDAYDGKDYIALNEDLSSWTAADTAAQITQRKWEAARVAEQDRAYLEGLCVESLRRYLENGKETLQRADPPKTHVTHHPISDHEVTLRCWALGFYPAEITLTWQRDGEDQTQDTELVETRPAGDRTFQKWAAVVVPSGEEQRYTCHVQHEGLPKPLTLRWEPSSQSTVPIVGIVAGLAVLAVVVIGAVVAAVMCRRKSSGGKGGSYSQAACSDSAQGSDVSLTA

SEQ ID NO: 487 - protein, 474 aa, synthetic construct
MSRSVALAVLALLSLSGLEAEEVHDLERKYGGGGSGGGGSGGGGSIQRTPKIQVYSRHPAENGKSNFLNCYVSGFHPSDIEVDLLKNGERIEKVEHSDLSFSKDWSFYLLYYTEFTPTEKDEYACRVNHVTLSQPKIVKWDRDMGGGGSGGGGSGGGGSGGGGSGSHSMRYFYTAMSRPGRGEPRFITVGYVDDTLFVRFDSDATSPRKEPRAPWIEQEGPEYWDRETQISKTNTQTYRENLRTALRYYNQSEAGSHIIQRMYGCDVGPDGRLLRGYDQDAYDGKDYIALNEDLSSWTAADTAAQITQRKWEAARVAEQDRAYLEGLCVESLRRYLENGKETLQRADPPKTHVTHHPISDHEVTLRCWALGFYPAEITLTWQRDGEDQTQDTELVETRPAGDRTFQKWAAVVVPSGEEQRYTCHVQHEGLPKPLTLRWEPSSQSTVPIMALIVLGGVAGLLLFIGLGIFFCVRC

SEQ ID NO: 488 - protein, 480 aa, synthetic construct
MSRSVALAVLALLSLSGLEAIQRTPKIQVYSRHPAENGKSNFLNCYVSGFHPSDIEVDLLKNGERIEKVEHSDLSFSKDWSFYLLYYTEFTPTEKDEYACRVNHVTLSQPKIVKWDRDMGGGGSGGGGSGGGGSGGGGSGSHSMRYFFTSVSRPGRGEPRFIAVGYVDDTQFVRFDSDAASQRMEPRAPWIEQEGPEYWDQETRNVKAQSQTDRVDLGTLRGYYNQSEAGSHTIQIMYGCDVGSDGRFLRGYRQDAYDGKDYIALNEDLRSWTAADMAAQITKRKWEAAHEAEQLRAYLDGTCVEWLRRYLENGKETLQRTDPPKTHMTHHPISDHEATLRCWALGFYPAEITLTWQRDGEDQTQDTELVETRPAGDGTFQKWAAVVVPSGEEQRYTCHVQHEGLPKPLTLRWELSSQPTIPIVGIIAGLVLLGAVITGAVVAAVMWRRKSSDRKGGSYTQAASSDSAQGSDVSLTACKV

SEQ ID NO: 489 - protein, 449 aa, synthetic construct
MSRSVALAVLALLSLSGLEAIQRTPKIQVYSRHPAENGKSNFLNCYVSGFHPSDIEVDLLKNGERIEKVEHSDLSFSKDWSFYLLYYTEFTPTEKDEYACRVNHVTLSQPKIVKWDRDMGGGGSGGGGSGGGGSGGGGSGSHSMRYFFTSVSRPGRGEPRFIAVGYVDDTQFVRFDSDAASQRMEPRAPWIEQEGPEYWDQETRNVKAQSQTDRVDLGTLRGYYNQSEAGSHTIQIMYGCDVGSDGRFLRGYRQDAYDGKDYIALNEDLRSWTAADMAAQITKRKWEAAHEAEQLRAYLDGTCVEWLRRYLENGKETLQRTDPPKTHMTHHPISDHEATLRCWALGFYPAEITLTWQRDGEDQTQDTELVETRPAGDGTFQKWAAVVVPSGEEQRYTCHVQHEGLPKPLTLRWELSSQPTIPIMALIVLGGVAGLLLFIGLGIFFCVRC

SEQ ID NO: 490 - protein, 504 aa, synthetic construct
MSRSVALAVLALLSLSGLEARLRAEAQVKGGGGSGGGGSGGGGSIQRTPKIQVYSRHPAENGKSNFLNCYVSGFHPSDIEVDLLKNGERIEKVEHSDLSFSKDWSFYLLYYTEFTPTEKDEYACRVNHVTLSQPKIVKWDRDMGGGGSGGGGSGGGGSGGGGSGSHSMRYFFTSVSRPGRGEPRFIAVGYVDDTQFVRFDSDAASQRMEPRAPWIEQEGPEYWDQETRNVKAQSQTDRVDLGTLRGYYNQSEAGSHTIQIMYGCDVGSDGRFLRGYRQDAYDGKDYIALNEDLRSWTAADMAAQITKRKWEAAHEAEQLRAYLDGTCVEWLRRYLENGKETLQRTDPPKTHMTHHPISDHEATLRCWALGFYPAEITLTWQRDGEDQTQDTELVETRPAGDGTFQKWAAVVVPSGEEQRYTCHVQHEGLPKPLTLRWELSSQPTIPIVGIIAGLVLLGAVITGAVVAAVMWRRKSSDRKGGSYTQAASSDSAQGSDVSLTACKV

SEQ ID NO: 491 - protein, 473 aa, synthetic construct
MSRSVALAVLALLSLSGLEARLRAEAQVKGGGGSGGGGSGGGGSIQRTPKIQVYSRHPAENGKSNFLNCYVSGFHPSDIEVDLLKNGERIEKVEHSDLSFSKDWSFYLLYYTEFTPTEKDEYACRVNHVTLSQPKIVKWDRDMGGGGSGGGGSGGGGSGGGGSGSHSMRYFFTSVSRPGRGEPRFIAVGYVDDTQFVRFDSDAASQRMEPRAPWIEQEGPEYWDQETRNVKAQSQTDRVDLGTLRGYYNQSEAGSHTIQIMYGCDVGSDGRFLRGYRQDAYDGKDYIALNEDLRSWTAADMAAQITKRKWEAAHEAEQLRAYLDGTCVEWLRRYLENGKETLQRTDPPKTHMTHHPISDHEATLRCWALGFYPAEITLTWQRDGEDQTQDTELVETRPAGDGTFQKWAAVVVPSGEEQRYTCHVQHEGLPKPLTLRWELSSQPTIPIMALIVLGGVAGLLLFIGLGIFFCVRC

SEQ ID NO: 492 - protein, 481 aa, synthetic construct
MSRSVALAVLALLSLSGLEAIQRTPKIQVYSRHPAENGKSNFLNCYVSGFHPSDIEVDLLKNGERIEKVEHSDLSFSKDWSFYLLYYTEFTPTEKDEYACRVNHVTLSQPKIVKWDRDMGGGGSGGGGSGGGGSGGGGSGSHSMRYFSTSVSWPGRGEPRFIAVGYVDDTQFVRFDSDAASPRGEPREPWVEQEGPEYWDRETQKYKRQAQADRVNLRKLRGYYNQSEDGSHTLQRMFGCDLGPDGRLLRGYNQFAYDGKDYIALNEDLRSWTAADTAAQITQRKWEAAREAEQRRAYLEGTCVEWLRRYLENGKETLQRAEHPKTHVTHHPVSDHEATLRCWALGFYPAEITLTWQWDGEDQTQKAELVETRPAGDGTFQKWAAVVVPSGEEQRYTCHVQHEGLPEPLTLRWKPSSQPTIPIVGIVAGLAVLAVLAVLGAMVAVVMCRRKSSGGKGGSCSQAASSNSAQGSDESLIACKA

SEQ ID NO: 493 - protein, 481 aa, synthetic construct
MSRSVALAVLALLSLSGLEAIQRTPKIQVYSRHPAENGKSNFLNCYVSGFHPSDIEVDLLKNGERIEKVEHSDLSFSKDWSFYLLYYTEFTPTEKDEYACRVNHVTLSQPKIVKWDRDMGGGGSGGGGSGGGGSGGGGSGSHSMRYFSTSVSWPGRGEPRFIAVGYVDDTQFVRFDSDAASPRGEPREPWVEQEGPEYWDRETQKYKRQAQADRVNLRKLRGYYNQSEDGSHTLQRMFGCDLGPDGRLLRGYNQFAYDGKDYIALNEDLRSWTAADTAAQITQRKWEAAREAEQRRAYLEGTCVEWLRRYLENGKETLQRAEHPKTHVTHHPVSDHEATLRCWALGFYPAEITLTWQWDGEDQTQDTELVETRPAGDGTFQKWVAVVVPSGEEQRYTCHVQHEGLPEPLTLRWKPSSQPTIPIVGIVAGLAVLAVLAVLGAMVAVVMCRRKSSGGKGGSCSQAASSNSAQGSDESLIACKA

SEQ ID NO: 494 - protein, 481 aa, synthetic construct
MSRSVALAVLALLSLSGLEAIQRTPKIQVYSRHPAENGKSNFLNCYVSGFHPSDIEVDLLKNGERIEKVEHSDLSFSKDWSFYLLYYTEFTPTEKDEYACRVNHVTLSQPKIVKWDRDMGGGGSGGGGSGGGGSGGGGSGSHSMRYFSTSVSWPGRGEPRFIAVGYVDDTQFVRFDSDAASPRGEPREPWVEQEGPEYWDRETQKYKRQAQADRVNLRKLRGYYNQSEDGSHTLQRMFGCDLGPDGRLLRGYNQFAYDGKDYIALNEDLRSWTAADTAAQITQRKWEAAREAEQRRAYLEGTCVEWLRRYLENGKETLQRAEHPKTHVTHHPVSDHEATLRCWALGFYPAEITLTWQWDGEDQTQKAELVETRPAGDGTFQKWVAVVVPSGEEQRYTCHVQHEGLPEPLTLRWKPSSQPTIPIVGIVAGLAVLAVLAVLGAMVAVVMCRRKSSGGKGGSCSQAASSNSAQGSDESLIACKA

SEQ ID NO: 495 - protein, 481 aa, synthetic construct
MSRSVALAVLALLSLSGLEAIQRTPKIQVYSRHPAENGKSNFLNCYVSGFHPSDIEVDLLKNGERIEKVEHSDLSFSEDWSFYLLYYTEFTPTEKDEYACRVNHVTLSQPKIVKWDRDMGGGGSGGGGSGGGGSGGGGSGSHSMRYFSTSVSWPGRGEPRFIAVGYVDDTQFVRFDSDAASPRGEPREPWVEQEGPEYWDRETQKYKRQAQADRVNLRKLRGYYNQSEDGSHTLQRMFGCDLGPDGRLLRGYNQFAYDGKDYIALNEDLRSWTAADTAAQITQRKWEAAREAEQRRAYLEGTCVEWLRRYLENGKETLQRAEHPKTHVTHHPVSDHEATLRCWALGFYPAEITLTWQWDGEDQTQDTELVETRPAGDGTFQKWAAVVVPSGEEQRYTCHVQHEGLPEPLTLRWKPSSQPTIPIVGIVAGLAVLAVLAVLGAMVAVVMCRRKSSGGKGGSCSQAASSNSAQGSDESLIACKA

SEQ ID NO: 496 - protein, 481 aa, synthetic construct
MSRSVALAVLALLSLSGLEAIQRTPKIQVYSRHPAENGKSNFLNCYVSGFHPSDIEVDLLKNGERIEKVEHSDLSFSEDWSFYLLYYTEFTPTEKDEYACRVNHVTLSQPKIVKWDRDMGGGGSGGGGSGGGGSGGGGSGSHSMRYFSTSVSWPGRGEPRFIAVGYVDDTQFVRFDSDAASPRGEPREPWVEQEGPEYWDRETQKYKRQAQADRVNLRKLRGYYNQSEDGSHTLQRMFGCDLGPDGRLLRGYNQFAYDGKDYIALNEDLRSWTAADTAAQITQRKWEAAREAEQRRAYLEGTCVEWLRRYLENGKETLQRAEHPKTHVTHHPVSDHEATLRCWALGFYPAEITLTWQWDGEDQTQKAELVETRPAGDGTFQKWAAVVVPSGEEQRYTCHVQHEGLPEPLTLRWKPSSQPTIPIVGIVAGLAVLAVLAVLGAMVAVVMCRRKSSGGKGGSCSQAASSNSAQGSDESLIACKA

SEQ ID NO: 497 - protein, 481 aa, synthetic construct
MSRSVALAVLALLSLSGLEAIQRTPKIQVYSRHPAENGKSNFLNCYVSGFHPSDIEVDLLKNGERIEKVEHSDLSFSEDWSFYLLYYTEFTPTEKDEYACRVNHVTLSQPKIVKWDRDMGGGGSGGGGSGGGGSGGGGSGSHSMRYFSTSVSWPGRGEPRFIAVGYVDDTQFVRFDSDAASPRGEPREPWVEQEGPEYWDRETQKYKRQAQADRVNLRKLRGYYNQSEDGSHTLQRMFGCDLGPDGRLLRGYNQFAYDGKDYIALNEDLRSWTAADTAAQITQRKWEAAREAEQRRAYLEGTCVEWLRRYLENGKETLQRAEHPKTHVTHHPVSDHEATLRCWALGFYPAEITLTWQWDGEDQTQDTELVETRPAGDGTFQKWVAVVVPSGEEQRYTCHVQHEGLPEPLTLRWKPSSQPTIPIVGIVAGLAVLAVLAVLGAMVAVVMCRRKSSGGKGGSCSQAASSNSAQGSDESLIACKA

SEQ ID NO: 498 - protein, 481 aa, synthetic construct
MSRSVALAVLALLSLSGLEAIQRTPKIQVYSRHPAENGKSNFLNCYVSGFHPSDIEVDLLKNGERIEKVEHSDLSFSEDWSFYLLYYTEFTPTEKDEYACRVNHVTLSQPKIVKWDRDMGGGGSGGGGSGGGGSGGGGSGSHSMRYFSTSVSWPGRGEPRFIAVGYVDDTQFVRFDSDAASPRGEPREPWVEQEGPEYWDRETQKYKRQAQADRVNLRKLRGYYNQSEDGSHTLQRMFGCDLGPDGRLLRGYNQFAYDGKDYIALNEDLRSWTAADTAAQITQRKWEAAREAEQRRAYLEGTCVEWLRRYLENGKETLQRAEHPKTHVTHHPVSDHEATLRCWALGFYPAEITLTWQWDGEDQTQKAELVETRPAGDGTFQKWVAVVVPSGEEQRYTCHVQHEGLPEPLTLRWKPSSQPTIPIVGIVAGLAVLAVLAVLGAMVAVVMCRRKSSGGKGGSCSQAASSNSAQGSDESLIACKA

SEQ ID NO: 499 - protein, 449 aa, synthetic construct
MSRSVALAVLALLSLSGLEAIQRTPKIQVYSRHPAENGKSNFLNCYVSGFHPSDIEVDLLKNGERIEKVEHSDLSFSKDWSFYLLYYTEFTPTEKDEYACRVNHVTLSQPKIVKWDRDMGGGGSGGGGSGGGGSGGGGSGSHSMRYFSTSVSWPGRGEPRFIAVGYVDDTQFVRFDSDAASPRGEPREPWVEQEGPEYWDRETQKYKRQAQADRVNLRKLRGYYNQSEDGSHTLQRMFGCDLGPDGRLLRGYNQFAYDGKDYIALNEDLRSWTAADTAAQITQRKWEAAREAEQRRAYLEGTCVEWLRRYLENGKETLQRAEHPKTHVTHHPVSDHEATLRCWALGFYPAEITLTWQWDGEDQTQKAELVETRPAGDGTFQKWAAVVVPSGEEQRYTCHVQHEGLPEPLTLRWKPSSQPTIPIMALIVLGGVAGLLLFIGLGIFFCVRC

SEQ ID NO: 500 - protein, 449 aa, synthetic construct
MSRSVALAVLALLSLSGLEAIQRTPKIQVYSRHPAENGKSNFLNCYVSGFHPSDIEVDLLKNGERIEKVEHSDLSFSKDWSFYLLYYTEFTPTEKDEYACRVNHVTLSQPKIVKWDRDMGGGGSGGGGSGGGGSGGGGSGSHSMRYFSTSVSWPGRGEPRFIAVGYVDDTQFVRFDSDAASPRGEPREPWVEQEGPEYWDRETQKYKRQAQADRVNLRKLRGYYNQSEDGSHTLQRMFGCDLGPDGRLLRGYNQFAYDGKDYIALNEDLRSWTAADTAAQITQRKWEAAREAEQRRAYLEGTCVEWLRRYLENGKETLQRAEHPKTHVTHHPVSDHEATLRCWALGFYPAEITLTWQWDGEDQTQDTELVETRPAGDGTFQKWVAVVVPSGEEQRYTCHVQHEGLPEPLTLRWKPSSQPTIPIMALIVLGGVAGLLLFIGLGIFFCVRC

SEQ ID NO: 501 - protein, 449 aa, synthetic construct
MSRSVALAVLALLSLSGLEAIQRTPKIQVYSRHPAENGKSNFLNCYVSGFHPSDIEVDLLKNGERIEKVEHSDLSFSKDWSFYLLYYTEFTPTEKDEYACRVNHVTLSQPKIVKWDRDMGGGGSGGGGSGGGGSGGGGSGSHSMRYFSTSVSWPGRGEPRFIAVGYVDDTQFVRFDSDAASPRGEPREPWVEQEGPEYWDRETQKYKRQAQADRVNLRKLRGYYNQSEDGSHTLQRMFGCDLGPDGRLLRGYNQFAYDGKDYIALNEDLRSWTAADTAAQITQRKWEAAREAEQRRAYLEGTCVEWLRRYLENGKETLQRAEHPKTHVTHHPVSDHEATLRCWALGFYPAEITLTWQWDGEDQTQKAELVETRPAGDGTFQKWVAVVVPSGEEQRYTCHVQHEGLPEPLTLRWKPSSQPTIPIMALIVLGGVAGLLLFIGLGIFFCVRC

SEQ ID NO: 502 - protein, 449 aa, synthetic construct
MSRSVALAVLALLSLSGLEAIQRTPKIQVYSRHPAENGKSNFLNCYVSGFHPSDIEVDLLKNGERIEKVEHSDLSFSEDWSFYLLYYTEFTPTEKDEYACRVNHVTLSQPKIVKWDRDMGGGGSGGGGSGGGGSGGGGSGSHSMRYFSTSVSWPGRGEPRFIAVGYVDDTQFVRFDSDAASPRGEPREPWVEQEGPEYWDRETQKYKRQAQADRVNLRKLRGYYNQSEDGSHTLQRMFGCDLGPDGRLLRGYNQFAYDGKDYIALNEDLRSWTAADTAAQITQRKWEAAREAEQRRAYLEGTCVEWLRRYLENGKETLQRAEHPKTHVTHHPVSDHEATLRCWALGFYPAEITLTWQWDGEDQTQDTELVETRPAGDGTFQKWAAVVVPSGEEQRYTCHVQHEGLPEPLTLRWKPSSQPTIPIMALIVLGGVAGLLLFIGLGIFFCVRC

SEQ ID NO: 503 - protein, 449 aa, synthetic construct
MSRSVALAVLALLSLSGLEAIQRTPKIQVYSRHPAENGKSNFLNCYVSGFHPSDIEVDLLKNGERIEKVEHSDLSFSEDWSFYLLYYTEFTPTEKDEYACRVNHVTLSQPKIVKWDRDMGGGGSGGGGSGGGGSGGGGSGSHSMRYFSTSVSWPGRGEPRFIAVGYVDDTQFVRFDSDAASPRGEPREPWVEQEGPEYWDRETQKYKRQAQADRVNLRKLRGYYNQSEDGSHTLQRMFGCDLGPDGRLLRGYNQFAYDGKDYIALNEDLRSWTAADTAAQITQRKWEAAREAEQRRAYLEGTCVEWLRRYLENGKETLQRAEHPKTHVTHHPVSDHEATLRCWALGFYPAEITLTWQWDGEDQTQKAELVETRPAGDGTFQKWAAVVVPSGEEQRYTCHVQHEGLPEPLTLRWKPSSQPTIPIMALIVLGGVAGLLLFIGLGIFFCVRC

SEQ ID NO: 504 - protein, 449 aa, synthetic construct
MSRSVALAVLALLSLSGLEAIQRTPKIQVYSRHPAENGKSNFLNCYVSGFHPSDIEVDLLKNGERIEKVEHSDLSFSEDWSFYLLYYTEFTPTEKDEYACRVNHVTLSQPKIVKWDRDMGGGGSGGGGSGGGGSGGGGSGSHSMRYFSTSVSWPGRGEPRFIAVGYVDDTQFVRFDSDAASPRGEPREPWVEQEGPEYWDRETQKYKRQAQADRVNLRKLRGYYNQSEDGSHTLQRMFGCDLGPDGRLLRGYNQFAYDGKDYIALNEDLRSWTAADTAAQITQRKWEAAREAEQRRAYLEGTCVEWLRRYLENGKETLQRAEHPKTHVTHHPVSDHEATLRCWALGFYPAEITLTWQWDGEDQTQDTELVETRPAGDGTFQKWVAVVVPSGEEQRYTCHVQHEGLPEPLTLRWKPSSQPTIPIMALIVLGGVAGLLLFIGLGIFFCVRC

SEQ ID NO: 505 - protein, 449 aa, synthetic construct
MSRSVALAVLALLSLSGLEAIQRTPKIQVYSRHPAENGKSNFLNCYVSGFHPSDIEVDLLKNGERIEKVEHSDLSFSEDWSFYLLYYTEFTPTEKDEYACRVNHVTLSQPKIVKWDRDMGGGGSGGGGSGGGGSGGGGSGSHSMRYFSTSVSWPGRGEPRFIAVGYVDDTQFVRFDSDAASPRGEPREPWVEQEGPEYWDRETQKYKRQAQADRVNLRKLRGYYNQSEDGSHTLQRMFGCDLGPDGRLLRGYNQFAYDGKDYIALNEDLRSWTAADTAAQITQRKWEAAREAEQRRAYLEGTCVEWLRRYLENGKETLQRAEHPKTHVTHHPVSDHEATLRCWALGFYPAEITLTWQWDGEDQTQKAELVETRPAGDGTFQKWVAVVVPSGEEQRYTCHVQHEGLPEPLTLRWKPSSQPTIPIMALIVLGGVAGLLLFIGLGIFFCVRC

SEQ ID NO: 506 - protein, 480 aa, synthetic construct
MSRSVALAVLALLSLSGLEAIQRTPKIQVYSRHPAENGKSNFLNCYVSGFHPSDIEVDLLKNGERIEKVEHSDLSFSKDGSFYLLYYTEFTPTEKDEYACRVNHVTLSQPKIVKWDRDMGGGGSGGGGSGGGGSGGGGSGSHSMRYFFTSVSRPGRGEPRFIAVGYVDDTQFVRFDSDAASQRMEPRAPWIEQEGPEYWDGETRKVKAHSQTHRVDLGTLRGYYNQSEAGSHTVQRMYGCDVGSDWRFLRGYHQYAYDGKDYIALKEDLRSWTAADMAAQTTKHKWEAAHVAEQLRAYLEGTCVEWLRRYLENGKETLQRTDAPKTHMTHHAVSDHEATLRCWALSFYPAEITLTWQRDGEDQTQDTELVETRPAGDGTFQKWAAVVVPSGQEQRYTCHVQHEGLPKPLTLRWEPSSQPTIPIVGIIAGLVLFGAVITGAVVAAVMWRRKSSDRKGGSYSQAASSDSAQGSDVSLTACKV

SEQ ID NO: 507 - protein, 480 aa, synthetic construct
MSRSVALAVLALLSLSGLEAIQRTPKIQVYSRHPAENGKSNFLNCYVSGFHPSDIEVDLLKNGERIEKVEHSDLSFSKDGSFYLLYYTEFTPTEKDEYACRVNHVTLSQPKIVKWDRDMGGGGSGGGGSGGGGSGGGGSGSHSMRYFFTSVSRPGRGEPRFIAVGYVDDTQFVRFDSDAASQRMEPRAPWIEQEGPEYWDGETRKVKAHSQTHRVDLGTLRGYYNQSEAGSHTVQRMYGCDVGSDWRFLRGYHQYAYDGKDYIALKEDLRSWTAADMAAQTTKHKWEAAHVAEQLRAYLEGTCVEWLRRYLENGKETLQRTDAPKTHMTHHAVSDHEATLRCWALSFYPAEITLTWQRDGEDQTQKAELVETRPAGDGTFQKWAAVVVPSGQEQRYTCHVQHEGLPKPLTLRWEPSSQPTIPIVGIIAGLVLFGAVITGAVVAAVMWRRKSSDRKGGSYSQAASSDSAQGSDVSLTACKV

SEQ ID NO: 508 - protein, 481 aa, synthetic construct
MSRSVALAVLALLSLSGLEAIQRTPKIQVYSRHPAENGKSNFLNCYVSGFHPSDIEVDLLKNGERIEKVEHSDLSFSKDGSFYLLYYTEFTPTEKDEYACRVNHVTLSQPKIVKWDRDMGGGGSGGGGSGGGGSGGGGSGSHSMRYFSTSVSWPGRGEPRFIAVGYVDDTQFVRFDSDAASPRGEPREPWVEQEGPEYWDRETQKYKRQAQADRVNLRKLRGYYNQSEDGSHTLQRMFGCDLGPDGRLLRGYNQFAYDGKDYIALNEDLRSWTAADTAAQITQRKWEAAREAEQRRAYLEGTCVEWLRRYLENGKETLQRAEHPKTHVTHHPVSDHEATLRCWALGFYPAEITLTWQWDGEDQTQDTELVETRPAGDGTFQKWAAVVVPSGEEQRYTCHVQHEGLPEPLTLRWKPSSQPTIPIVGIVAGLAVLAVLAVLGAMVAVVMCRRKSSGGKGGSCSQAASSNSAQGSDESLIACKA

SEQ ID NO: 509 - protein, 481 aa, synthetic construct
MSRSVALAVLALLSLSGLEAIQRTPKIQVYSRHPAENGKSNFLNCYVSGFHPSDIEVDLLKNGERIEKVEHSDLSFSKDGSFYLLYYTEFTPTEKDEYACRVNHVTLSQPKIVKWDRDMGGGGSGGGGSGGGGSGGGGSGSHSMRYFSTSVSWPGRGEPRFIAVGYVDDTQFVRFDSDAASPRGEPREPWVEQEGPEYWDRETQKYKRQAQADRVNLRKLRGYYNQSEDGSHTLQRMFGCDLGPDGRLLRGYNQFAYDGKDYIALNEDLRSWTAADTAAQITQRKWEAAREAEQRRAYLEGTCVEWLRRYLENGKETLQRAEHPKTHVTHHPVSDHEATLRCWALGFYPAEITLTWQWDGEDQTQKAELVETRPAGDGTFQKWAAVVVPSGEEQRYTCHVQHEGLPEPLTLRWKPSSQPTIPIVGIVAGLAVLAVLAVLGAMVAVVMCRRKSSGGKGGSCSQAASSNSAQGSDESLIACKA

SEQ ID NO: 510 - DNA, 1440 bp, synthetic construct
  source 1..1440: mol_type = other DNA
atgagccggagcgtggctctggccgtgctggccctattgtctctgagcggactggaagccatccagagaaccccaaagatccaagtgtacagcagacaccctgccgagaacggcaagagcaatttcctgaactgctacgtgtccggctttcaccccagcgacatcgaggtggatctgctgaagaacggcgagagaatcgagaaggtcgaacacagcgatctgagcttcagcaaggattggtccttctacctgctgtactacaccgagttcacccctacagagaaggacgagtacgcctgcagagtgaaccacgtgaccctgagccagcctaagatcgtgaagtgggatagagatatgggcggcggaggctctggaggcggaggctctggaggaggcggctccggcggaggcggctccggcagccactccatgcgatatttttttaccagcgtatctcgaccaggcagaggcgagccccgcttcatagcggttggctacgttgatgacacccaatttgtaagattcgactcagatgctgcgtcacagagaatggagccaagagccccctggatagaacaggagggtcctgaatattgggatggtgagacaagaaaggtgaaagcacattctcagactcatagggtagatttgggtactttgagagggtattacaaccagtctgaagccggtagtcacactgttcaacgcatgtacggttgtgatgtcggatcagattggcgctttctcagagggtatcaccaatatgcttacgacgggaaagattatattgcgttgaaggaggacctcaggagttggaccgcagcagatatggccgcacagactacgaagcacaagtgggaggcggcccatgtggcggagcaactgcgagcgtatcttgagggcacatgcgtagagtggcttaggagatatctggagaatgggaaggaaactttgcaacgcacagacgctccaaagacgcacatgactcatcatgcagtgtccgatcacgaagctactctcaggtgttgggctttgtcattctatccggctgagatcaccctcacgtggcagcgggatggagaagatcaaacacaagacacagagcttgtagagacacgccccgctggggacggcaccttccaaaagtgggccgctgttgttgtaccctcaggacaggaacagcgctatacgtgccacgtgcagcatgagggcctgccgaaaccgctgacacttcgatgggagccatcttctcaacccaccataccaatcgtgggaatcatagctggattggttctttttggtgccgtaatcaccggtgctgtggttgcggcggtaatgtggcggcgcaagagctccgacagaaagggtggtagctatagtcaggccgcttccagtgactccgcacagggtagcgacgtatcactgacagcgtgcaaggta

SEQ ID NO: 511 - DNA, 1440 bp, synthetic construct
  source 1..1440: mol_type = other DNA
atgagccggagcgtggctctggccgtgctggccctattgtctctgagcggactggaagccatccagagaaccccaaagatccaagtgtacagcagacaccctgccgagaacggcaagagcaatttcctgaactgctacgtgtccggctttcaccccagcgacatcgaggtggatctgctgaagaacggcgagagaatcgagaaggtcgaacacagcgatctgagcttcagcaaggattggtccttctacctgctgtactacaccgagttcacccctacagagaaggacgagtacgcctgcagagtgaaccacgtgaccctgagccagcctaagatcgtgaagtgggatagagatatgggcggcggaggctctggaggcggaggctctggaggaggcggctccggcggaggcggctccggcagccactccatgcgatatttttttaccagcgtatctcgaccaggcagaggcgagccccgcttcatagcggttggctacgttgatgacacccaatttgtaagattcgactcagatgctgcgtcacagagaatggagccaagagccccctggatagaacaggagggtcctgaatattgggatggtgagacaagaaaggtgaaagcacattctcagactcatagggtagatttgggtactttgagagggtattacaaccagtctgaagccggtagtcacactgttcaacgcatgtacggttgtgatgtcggatcagattggcgctttctcagagggtatcaccaatatgcttacgacgggaaagattatattgcgttgaaggaggacctcaggagttggaccgcagcagatatggccgcacagactacgaagcacaagtgggaggcggcccatgtggcggagcaactgcgagcgtatcttgagggcacatgcgtagagtggcttaggagatatctggagaatgggaaggaaactttgcaacgcacagacgctccaaagacgcacatgactcatcatgcagtgtccgatcacgaagctactctcaggtgttgggctttgtcattctatccggctgagatcaccctcacgtggcagcgggatggagaagatcaaacacaaaaagcggagcttgtagagacacgccccgctggggacggcaccttccaaaagtgggccgctgttgttgtaccctcaggacaggaacagcgctatacgtgccacgtgcagcatgagggcctgccgaaaccgctgacacttcgatgggagccatcttctcaacccaccataccaatcgtgggaatcatagctggattggttctttttggtgccgtaatcaccggtgctgtggttgcggcggtaatgtggcggcgcaagagctccgacagaaagggtggtagctatagtcaggccgcttccagtgactccgcacagggtagcgacgtatcactgacagcgtgcaaggta

SEQ ID NO: 512 - DNA, 1440 bp, synthetic construct
  source 1..1440: mol_type = other DNA
atgagccggagcgtggctctggccgtgctggccctattgtctctgagcggactggaagccatccagagaaccccaaagatccaagtgtacagcagacaccctgccgagaacggcaagagcaatttcctgaactgctacgtgtccggctttcaccccagcgacatcgaggtggatctgctgaagaacggcgagagaatcgagaaggtcgaacacagcgatctgagcttcagcaaggattggtccttctacctgctgtactacaccgagttcacccctacagagaaggacgagtacgcctgcagagtgaaccacgtgaccctgagccagcctaagatcgtgaagtgggatagagatatgggcggcggaggctctggaggcggaggctctggaggaggcggctccggcggaggcggctccggcagccactccatgcgatatttttttaccagcgtatctcgaccaggcagaggcgagccccgcttcatagcggttggctacgttgatgacacccaatttgtaagattcgactcagatgctgcgtcacagagaatggagccaagagccccctggatagaacaggagggtcctgaatattgggatggtgagacaagaaaggtgaaagcacattctcagactcatagggtagatttgggtactttgagagggtattacaaccagtctgaagccggtagtcacactgttcaacgcatgtacggttgtgatgtcggatcagattggcgctttctcagagggtatcaccaatatgcttacgacgggaaagattatattgcgttgaaggaggacctcaggagttggaccgcagcagatatggccgcacagactacgaagcacaagtgggaggcggcccatgtggcggagcaactgcgagcgtatcttgagggcacatgcgtagagtggcttaggagatatctggagaatgggaaggaaactttgcaacgcacagacgctccaaagacgcacatgactcatcatgcagtgtccgatcacgaagctactctcaggtgttgggctttgtcattctatccggctgagatcaccctcacgtggcagcgggatggagaagatcaaacacaagacacagagcttgtagagacacgccccgctggggacggcaccttccaaaagtgggtggctgttgttgtaccctcaggacaggaacagcgctatacgtgccacgtgcagcatgagggcctgccgaaaccgctgacacttcgatgggagccatcttctcaacccaccataccaatcgtgggaatcatagctggattggttctttttggtgccgtaatcaccggtgctgtggttgcggcggtaatgtggcggcgcaagagctccgacagaaagggtggtagctatagtcaggccgcttccagtgactccgcacagggtagcgacgtatcactgacagcgtgcaaggta

SEQ ID NO: 513 - DNA, 1440 bp, synthetic construct
  source 1..1440: mol_type = other DNA
atgagccggagcgtggctctggccgtgctggccctattgtctctgagcggactggaagccatccagagaaccccaaagatccaagtgtacagcagacaccctgccgagaacggcaagagcaatttcctgaactgctacgtgtccggctttcaccccagcgacatcgaggtggatctgctgaagaacggcgagagaatcgagaaggtcgaacacagcgatctgagcttcagcaaggattggtccttctacctgctgtactacaccgagttcacccctacagagaaggacgagtacgcctgcagagtgaaccacgtgaccctgagccagcctaagatcgtgaagtgggatagagatatgggcggcggaggctctggaggcggaggctctggaggaggcggctccggcggaggcggctccggcagccactccatgcgatatttttttaccagcgtatctcgaccaggcagaggcgagccccgcttcatagcggttggctacgttgatgacacccaatttgtaagattcgactcagatgctgcgtcacagagaatggagccaagagccccctggatagaacaggagggtcctgaatattgggatggtgagacaagaaaggtgaaagcacattctcagactcatagggtagatttgggtactttgagagggtattacaaccagtctgaagccggtagtcacactgttcaacgcatgtacggttgtgatgtcggatcagattggcgctttctcagagggtatcaccaatatgcttacgacgggaaagattatattgcgttgaaggaggacctcaggagttggaccgcagcagatatggccgcacagactacgaagcacaagtgggaggcggcccatgtggcggagcaactgcgagcgtatcttgagggcacatgcgtagagtggcttaggagatatctggagaatgggaaggaaactttgcaacgcacagacgctccaaagacgcacatgactcatcatgcagtgtccgatcacgaagctactctcaggtgttgggctttgtcattctatccggctgagatcaccctcacgtggcagcgggatggagaagatcaaacacaaaaagcggagcttgtagagacacgccccgctggggacggcaccttccaaaagtgggtggctgttgttgtaccctcaggacaggaacagcgctatacgtgccacgtgcagcatgagggcctgccgaaaccgctgacacttcgatgggagccatcttctcaacccaccataccaatcgtgggaatcatagctggattggttctttttggtgccgtaatcaccggtgctgtggttgcggcggtaatgtggcggcgcaagagctccgacagaaagggtggtagctatagtcaggccgcttccagtgactccgcacagggtagcgacgtatcactgacagcgtgcaaggta

SEQ ID NO: 514 - DNA, 1440 bp, synthetic construct
  source 1..1440: mol_type = other DNA
atgagccggagcgtggctctggccgtgctggccctattgtctctgagcggactggaagccatccagagaaccccaaagatccaagtgtacagcagacaccctgccgagaacggcaagagcaatttcctgaactgctacgtgtccggctttcaccccagcgacatcgaggtggatctgctgaagaacggcgagagaatcgagaaggtcgaacacagcgatctgagcttcagcgaagattggtccttctacctgctgtactacaccgagttcacccctacagagaaggacgagtacgcctgcagagtgaaccacgtgaccctgagccagcctaagatcgtgaagtgggatagagatatgggcggcggaggctctggaggcggaggctctggaggaggcggctccggcggaggcggctccggcagccactccatgcgatatttttttaccagcgtatctcgaccaggcagaggcgagccccgcttcatagcggttggctacgttgatgacacccaatttgtaagattcgactcagatgctgcgtcacagagaatggagccaagagccccctggatagaacaggagggtcctgaatattgggatggtgagacaagaaaggtgaaagcacattctcagactcatagggtagatttgggtactttgagagggtattacaaccagtctgaagccggtagtcacactgttcaacgcatgtacggttgtgatgtcggatcagattggcgctttctcagagggtatcaccaatatgcttacgacgggaaagattatattgcgttgaaggaggacctcaggagttggaccgcagcagatatggccgcacagactacgaagcacaagtgggaggcggcccatgtggcggagcaactgcgagcgtatcttgagggcacatgcgtagagtggcttaggagatatctggagaatgggaaggaaactttgcaacgcacagacgctccaaagacgcacatgactcatcatgcagtgtccgatcacgaagctactctcaggtgttgggctttgtcattctatccggctgagatcaccctcacgtggcagcgggatggagaagatcaaacacaagacacagagcttgtagagacacgccccgctggggacggcaccttccaaaagtgggccgctgttgttgtaccctcaggacaggaacagcgctatacgtgccacgtgcagcatgagggcctgccgaaaccgctgacacttcgatgggagccatcttctcaacccaccataccaatcgtgggaatcatagctggattggttctttttggtgccgtaatcaccggtgctgtggttgcggcggtaatgtggcggcgcaagagctccgacagaaagggtggtagctatagtcaggccgcttccagtgactccgcacagggtagcgacgtatcactgacagcgtgcaaggta

SEQ ID NO: 515 - DNA, 1440 bp, synthetic construct
  source 1..1440: mol_type = other DNA
atgagccggagcgtggctctggccgtgctggccctattgtctctgagcggactggaagccatccagagaaccccaaagatccaagtgtacagcagacaccctgccgagaacggcaagagcaatttcctgaactgctacgtgtccggctttcaccccagcgacatcgaggtggatctgctgaagaacggcgagagaatcgagaaggtcgaacacagcgatctgagcttcagcgaagattggtccttctacctgctgtactacaccgagttcacccctacagagaaggacgagtacgcctgcagagtgaaccacgtgaccctgagccagcctaagatcgtgaagtgggatagagatatgggcggcggaggctctggaggcggaggctctggaggaggcggctccggcggaggcggctccggcagccactccatgcgatatttttttaccagcgtatctcgaccaggcagaggcgagccccgcttcatagcggttggctacgttgatgacacccaatttgtaagattcgactcagatgctgcgtcacagagaatggagccaagagccccctggatagaacaggagggtcctgaatattgggatggtgagacaagaaaggtgaaagcacattctcagactcatagggtagatttgggtactttgagagggtattacaaccagtctgaagccggtagtcacactgttcaacgcatgtacggttgtgatgtcggatcagattggcgctttctcagagggtatcaccaatatgcttacgacgggaaagattatattgcgttgaaggaggacctcaggagttggaccgcagcagatatggccgcacagactacgaagcacaagtgggaggcggcccatgtggcggagcaactgcgagcgtatcttgagggcacatgcgtagagtggcttaggagatatctggagaatgggaaggaaactttgcaacgcacagacgctccaaagacgcacatgactcatcatgcagtgtccgatcacgaagctactctcaggtgttgggctttgtcattctatccggctgagatcaccctcacgtggcagcgggatggagaagatcaaacacaaaaagcggagcttgtagagacacgccccgctggggacggcaccttccaaaagtgggccgctgttgttgtaccctcaggacaggaacagcgctatacgtgccacgtgcagcatgagggcctgccgaaaccgctgacacttcgatgggagccatcttctcaacccaccataccaatcgtgggaatcatagctggattggttctttttggtgccgtaatcaccggtgctgtggttgcggcggtaatgtggcggcgcaagagctccgacagaaagggtggtagctatagtcaggccgcttccagtgactccgcacagggtagcgacgtatcactgacagcgtgcaaggta

SEQ ID NO: 516 - DNA, 1440 bp, synthetic construct
  source 1..1440: mol_type = other DNA
atgagccggagcgtggctctggccgtgctggccctattgtctctgagcggactggaagccatccagagaaccccaaagatccaagtgtacagcagacaccctgccgagaacggcaagagcaatttcctgaactgctacgtgtccggctttcaccccagcgacatcgaggtggatctgctgaagaacggcgagagaatcgagaaggtcgaacacagcgatctgagcttcagcgaagattggtccttctacctgctgtactacaccgagttcacccctacagagaaggacgagtacgcctgcagagtgaaccacgtgaccctgagccagcctaagatcgtgaagtgggatagagatatgggcggcggaggctctggaggcggaggctctggaggaggcggctccggcggaggcggctccggcagccactccatgcgatatttttttaccagcgtatctcgaccaggcagaggcgagccccgcttcatagcggttggctacgttgatgacacccaatttgtaagattcgactcagatgctgcgtcacagagaatggagccaagagccccctggatagaacaggagggtcctgaatattgggatggtgagacaagaaaggtgaaagcacattctcagactcatagggtagatttgggtactttgagagggtattacaaccagtctgaagccggtagtcacactgttcaacgcatgtacggttgtgatgtcggatcagattggcgctttctcagagggtatcaccaatatgcttacgacgggaaagattatattgcgttgaaggaggacctcaggagttggaccgcagcagatatggccgcacagactacgaagcacaagtgggaggcggcccatgtggcggagcaactgcgagcgtatcttgagggcacatgcgtagagtggcttaggagatatctggagaatgggaaggaaactttgcaacgcacagacgctccaaagacgcacatgactcatcatgcagtgtccgatcacgaagctactctcaggtgttgggctttgtcattctatccggctgagatcaccctcacgtggcagcgggatggagaagatcaaacacaagacacagagcttgtagagacacgccccgctggggacggcaccttccaaaagtgggtggctgttgttgtaccctcaggacaggaacagcgctatacgtgccacgtgcagcatgagggcctgccgaaaccgctgacacttcgatgggagccatcttctcaacccaccataccaatcgtgggaatcatagctggattggttctttttggtgccgtaatcaccggtgctgtggttgcggcggtaatgtggcggcgcaagagctccgacagaaagggtggtagctatagtcaggccgcttccagtgactccgcacagggtagcgacgtatcactgacagcgtgcaaggta

SEQ ID NO: 517 - DNA, 1440 bp, synthetic construct
  source 1..1440: mol_type = other DNA
atgagccggagcgtggctctggccgtgctggccctattgtctctgagcggactggaagccatccagagaaccccaaagatccaagtgtacagcagacaccctgccgagaacggcaagagcaatttcctgaactgctacgtgtccggctttcaccccagcgacatcgaggtggatctgctgaagaacggcgagagaatcgagaaggtcgaacacagcgatctgagcttcagcgaagattggtccttctacctgctgtactacaccgagttcacccctacagagaaggacgagtacgcctgcagagtgaaccacgtgaccctgagccagcctaagatcgtgaagtgggatagagatatgggcggcggaggctctggaggcggaggctctggaggaggcggctccggcggaggcggctccggcagccactccatgcgatatttttttaccagcgtatctcgaccaggcagaggcgagccccgcttcatagcggttggctacgttgatgacacccaatttgtaagattcgactcagatgctgcgtcacagagaatggagccaagagccccctggatagaacaggagggtcctgaatattgggatggtgagacaagaaaggtgaaagcacattctcagactcatagggtagatttgggtactttgagagggtattacaaccagtctgaagccggtagtcacactgttcaacgcatgtacggttgtgatgtcggatcagattggcgctttctcagagggtatcaccaatatgcttacgacgggaaagattatattgcgttgaaggaggacctcaggagttggaccgcagcagatatggccgcacagactacgaagcacaagtgggaggcggcccatgtggcggagcaactgcgagcgtatcttgagggcacatgcgtagagtggcttaggagatatctggagaatgggaaggaaactttgcaacgcacagacgctccaaagacgcacatgactcatcatgcagtgtccgatcacgaagctactctcaggtgttgggctttgtcattctatccggctgagatcaccctcacgtggcagcgggatggagaagatcaaacacaaaaagcggagcttgtagagacacgccccgctggggacggcaccttccaaaagtgggtggctgttgttgtaccctcaggacaggaacagcgctatacgtgccacgtgcagcatgagggcctgccgaaaccgctgacacttcgatgggagccatcttctcaacccaccataccaatcgtgggaatcatagctggattggttctttttggtgccgtaatcaccggtgctgtggttgcggcggtaatgtggcggcgcaagagctccgacagaaagggtggtagctatagtcaggccgcttccagtgactccgcacagggtagcgacgtatcactgacagcgtgcaaggta

SEQ ID NO: 518 - DNA, 1347 bp, synthetic construct
  source 1..1347: mol_type = other DNA
atgagccggagcgtggctctggccgtgctggccctattgtctctgagcggactggaagccatccagagaaccccaaagatccaagtgtacagcagacaccctgccgagaacggcaagagcaatttcctgaactgctacgtgtccggctttcaccccagcgacatcgaggtggatctgctgaagaacggcgagagaatcgagaaggtcgaacacagcgatctgagcttcagcaaggattggtccttctacctgctgtactacaccgagttcacccctacagagaaggacgagtacgcctgcagagtgaaccacgtgaccctgagccagcctaagatcgtgaagtgggatagagatatgggcggcggaggctctggaggcggaggctctggaggaggcggctccggcggaggcggctccggcagccactccatgcgatatttttttaccagcgtatctcgaccaggcagaggcgagccccgcttcatagcggttggctacgttgatgacacccaatttgtaagattcgactcagatgctgcgtcacagagaatggagccaagagccccctggatagaacaggagggtcctgaatattgggatggtgagacaagaaaggtgaaagcacattctcagactcatagggtagatttgggtactttgagagggtattacaaccagtctgaagccggtagtcacactgttcaacgcatgtacggttgtgatgtcggatcagattggcgctttctcagagggtatcaccaatatgcttacgacgggaaagattatattgcgttgaaggaggacctcaggagttggaccgcagcagatatggccgcacagactacgaagcacaagtgggaggcggcccatgtggcggagcaactgcgagcgtatcttgagggcacatgcgtagagtggcttaggagatatctggagaatgggaaggaaactttgcaacgcacagacgctccaaagacgcacatgactcatcatgcagtgtccgatcacgaagctactctcaggtgttgggctttgtcattctatccggctgagatcaccctcacgtggcagcgggatggagaagatcaaacacaagacacagagcttgtagagacacgccccgctggggacggcaccttccaaaagtgggccgctgttgttgtaccctcaggacaggaacagcgctatacgtgccacgtgcagcatgagggcctgccgaaaccgctgacacttcgatgggagccatcttctcaacccaccataccaatcatggccctgatcgtgctgggcggcgtggccggcctgctgctgttcatcggcctgggcatttttttctgcgtgcggtgc

SEQ ID NO: 519 - DNA, 1347 bp, synthetic construct
  source 1..1347: mol_type = other DNA
atgagccggagcgtggctctggccgtgctggccctattgtctctgagcggactggaagccatccagagaaccccaaagatccaagtgtacagcagacaccctgccgagaacggcaagagcaatttcctgaactgctacgtgtccggctttcaccccagcgacatcgaggtggatctgctgaagaacggcgagagaatcgagaaggtcgaacacagcgatctgagcttcagcaaggattggtccttctacctgctgtactacaccgagttcacccctacagagaaggacgagtacgcctgcagagtgaaccacgtgaccctgagccagcctaagatcgtgaagtgggatagagatatgggcggcggaggctctggaggcggaggctctggaggaggcggctccggcggaggcggctccggcagccactccatgcgatatttttttaccagcgtatctcgaccaggcagaggcgagccccgcttcatagcggttggctacgttgatgacacccaatttgtaagattcgactcagatgctgcgtcacagagaatggagccaagagccccctggatagaacaggagggtcctgaatattgggatggtgagacaagaaaggtgaaagcacattctcagactcatagggtagatttgggtactttgagagggtattacaaccagtctgaagccggtagtcacactgttcaacgcatgtacggttgtgatgtcggatcagattggcgctttctcagagggtatcaccaatatgcttacgacgggaaagattatattgcgttgaaggaggacctcaggagttggaccgcagcagatatggccgcacagactacgaagcacaagtgggaggcggcccatgtggcggagcaactgcgagcgtatcttgagggcacatgcgtagagtggcttaggagatatctggagaatgggaaggaaactttgcaacgcacagacgctccaaagacgcacatgactcatcatgcagtgtccgatcacgaagctactctcaggtgttgggctttgtcattctatccggctgagatcaccctcacgtggcagcgggatggagaagatcaaacacaaaaagcggagcttgtagagacacgccccgctggggacggcaccttccaaaagtgggccgctgttgttgtaccctcaggacaggaacagcgctatacgtgccacgtgcagcatgagggcctgccgaaaccgctgacacttcgatgggagccatcttctcaacccaccataccaatcatggccctgatcgtgctgggcggcgtggccggcctgctgctgttcatcggcctgggcatttttttctgcgtgcggtgc

SEQ ID NO: 520 - protein, 9 aa, Homo sapiens
QYDDAVYKL

SEQ ID NO: 521 - protein, 9 aa, Homo sapiens
RYRPGTVAL

SEQ ID NO: 522 - protein, 9 aa, Homo sapiens
LSSPVTKSF

SEQ ID NO: 523 - protein, 10 aa, Homo sapiens
EEVHDLERKY

SEQ ID NO: 524 - protein, 9 aa, Homo sapiens
RLRAEAQVK

SEQ ID NO: 525 - protein, 20 aa, Homo sapiens
MSRSVALAVLALLSLSGLEA

SEQ ID NO: 526 - protein, 481 aa, synthetic construct
MSRSVALAVLALLSLSGLEAIQRTPKIQVYSRHPAENGKSNFLNCYVSGFHPSDIEVDLLKNGERIEKVEHSDLSFSKDWSFYLLYYTEFTPTEKDEYACRVNHVTLSQPKIVKWDRDMGGGGSGGGGSGGGGSGGGGSGSHSMRYFSTSVSWPGRGEPRFIAVGYVDDTQFVRFDSDAASPRGEPREPWVEQEGPEYWDRETQKYKRQAQTDRVNLRKLRGYYNQSEDGSHTLQRMFGCDLGPDGRLLRGYNQFAYDGKDYIALNEDLRSWTAADTAAQITQRKWEAAREAEQRRAYLEGTCVEWLRRYLENGKETLQRAEHPKTHVTHHPVSDHEATLRCWALGFYPAEITLTWQWDGEDQTQDTELVETRPAGDGTFQKWAAVVVPSGEEQRYTCHVQHEGLPEPLTLRWKPSSQPTIPIVGIVAGLAVLAVLAVLGAMVAVVMCRRKSSGGKGGSCSQAASSNSAQGSDESLIACKA

SEQ ID NO: 527 - protein, 481 aa, synthetic construct
MSRSVALAVLALLSLSGLEAIQRTPKIQVYSRHPAENGKSNFLNCYVSGFHPSDIEVDLLKNGERIEKVEHSDLSFSKDWSFYLLYYTEFTPTEKDEYACRVNHVTLSQPKIVKWDRDMGGGGSGGGGSGGGGSGGGGSGSHSMRYFSTSVSWPGRGEPRFIAVGYVDDTQFVRFDSDAASPRGEPREPWVEQEGPEYWDRETQKYKRQAQTDRVNLRKLRGYYNQSEDGSHTLQRMFGCDLGPDGRLLRGYNQFAYDGKDYIALNEDLRSWTAADTAAQITQRKWEAAREAEQRRAYLEGTCVEWLRRYLENGKETLQRAEHPKTHVTHHPVSDHEATLRCWALGFYPAEITLTWQWDGEDQTQKAELVETRPAGDGTFQKWAAVVVPSGEEQRYTCHVQHEGLPEPLTLRWKPSSQPTIPIVGIVAGLAVLAVLAVLGAMVAVVMCRRKSSGGKGGSCSQAASSNSAQGSDESLIACKA

SEQ ID NO: 528 - protein, 505 aa, synthetic construct
MSRSVALAVLALLSLSGLEARYRPGTVALGGGGSGGGGSGGGGSIQRTPKIQVYSRHPAENGKSNFLNCYVSGFHPSDIEVDLLKNGERIEKVEHSDLSFSKDWSFYLLYYTEFTPTEKDEYACRVNHVTLSQPKIVKWDRDMGGGGSGGGGSGGGGSGGGGSGSHSMRYFDTAVSRPGRGEPRFISVGYVDDTQFVRFDSDAASPRGEPRAPWVEQEGPEYWDRETQKYKRQAQTDRVSLRNLRGYYNQSEDGSHTLQRMSGCDLGPDGRLLRGYDQSAYDGKDYIALNEDLRSWTAADTAAQITQRKLEAARAAEQLRAYLEGTCVEWLRRYLENGKETLQRAEPPKTHVTHHPLSDHEATLRCWALGFYPAEITLTWQRDGEDQTQDTELVETRPAGDGTFQKWAAVVVPSGQEQRYTCHMQHEGLQEPLTLSWEPSSQPTIPIMGIVAGLAVLVVLAVLGAVVTAMMCRRKSSGGKGGSCSQAACSNSAQGSDESLITCKA

SEQ ID NO: 529 - protein, 9 aa, synthetic construct
IIDKSGAAV

SEQ ID NO: 530 - protein, 9 aa, synthetic construct
IIDKSGEEV

SEQ ID NO: 531 - protein, 9 aa, synthetic construct
IIDKSGLAV

SEQ ID NO: 532 - protein, 9 aa, synthetic construct
IIDKSGSTV

SEQ ID NO: 533 - protein, 505 aa, synthetic construct
MSRSVALAVLALLSLSGLEAIIDKSGAAVGGGGSGGGGSGGGGSIQRTPKIQVYSRHPAENGKSNFLNCYVSGFHPSDIEVDLLKNGERIEKVEHSDLSFSKDWSFYLLYYTEFTPTEKDEYACRVNHVTLSQPKIVKWDRDMGGGGSGGGGSGGGGSGGGGSGSHSMRYFYTAVSRPGRGEPRFIAVGYVDDTQFVQFDSDAASPRGEPRAPWVEQEGPEYWDRETQKYKRQAQTDRVNLRKLRGYYNQSEAGSHTLQRMYGCDLGPDGRLLRGYNQFAYDGKDYIALNEDLRSWTAADKAAQITQRKWEAAREAEQRRAYLEGTCVEWLRRYLENGKKTLQRAEHPKTHVTHHPVSDHEATLRCWALGFYPAEITLTWQRDGEDQTQDTELVETRPAGDGTFQKWAAVVVPSGEEQRYTCHVQHEGLPEPLTLRWGPSSQPTIPIVGIVAGLAVLAVLAVLGAVMAVVMCRRKSSGGKGGSCSQAASSNSAQGSDESLIACKA

SEQ ID NO: 534 - protein, 505 aa, synthetic construct
MSRSVALAVLALLSLSGLEAIIDKSGEEVGGGGSGGGGSGGGGSIQRTPKIQVYSRHPAENGKSNFLNCYVSGFHPSDIEVDLLKNGERIEKVEHSDLSFSKDWSFYLLYYTEFTPTEKDEYACRVNHVTLSQPKIVKWDRDMGGGGSGGGGSGGGGSGGGGSGSHSMRYFYTAVSRPGRGEPRFIAVGYVDDTQFVQFDSDAASPRGEPRAPWVEQEGPEYWDRETQKYKRQAQTDRVNLRKLRGYYNQSEAGSHTLQRMYGCDLGPDGRLLRGYNQFAYDGKDYIALNEDLRSWTAADKAAQITQRKWEAAREAEQRRAYLEGTCVEWLRRYLENGKKTLQRAEHPKTHVTHHPVSDHEATLRCWALGFYPAEITLTWQRDGEDQTQDTELVETRPAGDGTFQKWAAVVVPSGEEQRYTCHVQHEGLPEPLTLRWGPSSQPTIPIVGIVAGLAVLAVLAVLGAVMAVVMCRRKSSGGKGGSCSQAASSNSAQGSDESLIACKA

SEQ ID NO: 535 - protein, 505 aa, synthetic construct
MSRSVALAVLALLSLSGLEAIIDKSGLAVGGGGSGGGGSGGGGSIQRTPKIQVYSRHPAENGKSNFLNCYVSGFHPSDIEVDLLKNGERIEKVEHSDLSFSKDWSFYLLYYTEFTPTEKDEYACRVNHVTLSQPKIVKWDRDMGGGGSGGGGSGGGGSGGGGSGSHSMRYFYTAVSRPGRGEPRFIAVGYVDDTQFVQFDSDAASPRGEPRAPWVEQEGPEYWDRETQKYKRQAQTDRVNLRKLRGYYNQSEAGSHTLQRMYGCDLGPDGRLLRGYNQFAYDGKDYIALNEDLRSWTAADKAAQITQRKWEAAREAEQRRAYLEGTCVEWLRRYLENGKKTLQRAEHPKTHVTHHPVSDHEATLRCWALGFYPAEITLTWQRDGEDQTQDTELVETRPAGDGTFQKWAAVVVPSGEEQRYTCHVQHEGLPEPLTLRWGPSSQPTIPIVGIVAGLAVLAVLAVLGAVMAVVMCRRKSSGGKGGSCSQAASSNSAQGSDESLIACKA

SEQ ID NO: 536 - protein, 505 aa, synthetic construct
MSRSVALAVLALLSLSGLEAIIDKSGSTVGGGGSGGGGSGGGGSIQRTPKIQVYSRHPAENGKSNFLNCYVSGFHPSDIEVDLLKNGERIEKVEHSDLSFSKDWSFYLLYYTEFTPTEKDEYACRVNHVTLSQPKIVKWDRDMGGGGSGGGGSGGGGSGGGGSGSHSMRYFYTAVSRPGRGEPRFIAVGYVDDTQFVQFDSDAASPRGEPRAPWVEQEGPEYWDRETQKYKRQAQTDRVNLRKLRGYYNQSEAGSHTLQRMYGCDLGPDGRLLRGYNQFAYDGKDYIALNEDLRSWTAADKAAQITQRKWEAAREAEQRRAYLEGTCVEWLRRYLENGKKTLQRAEHPKTHVTHHPVSDHEATLRCWALGFYPAEITLTWQRDGEDQTQDTELVETRPAGDGTFQKWAAVVVPSGEEQRYTCHVQHEGLPEPLTLRWGPSSQPTIPIVGIVAGLAVLAVLAVLGAVMAVVMCRRKSSGGKGGSCSQAASSNSAQGSDESLIACKA

SEQ ID NO: 537 - RNA, 20 nt, synthetic construct
  source 1..20: mol_type = other RNA
cttaccccacttaactatct

SEQ ID NO: 538 - RNA, 20 nt, synthetic construct
  source 1..20: mol_type = other RNA
acagcccaagatagttaagt

SEQ ID NO: 539 - RNA, 20 nt, synthetic construct
  source 1..20: mol_type = other RNA
cagcccaagatagttaagtg

SEQ ID NO: 540 - RNA, 20 nt, synthetic construct
  source 1..20: mol_type = other RNA
cagtaagtcaacttcaatgt

SEQ ID NO: 541 - RNA, 20 nt, synthetic construct
  source 1..20: mol_type = other RNA
actcacgctggatagcctcc

SEQ ID NO: 542 - RNA, 20 nt, synthetic construct
  source 1..20: mol_type = other RNA
aagtcaacttcaatgtcgga

SEQ ID NO: 543 - RNA, 20 nt, synthetic construct
  source 1..20: mol_type = other RNA
ggatttgcctagcttcccca

SEQ ID NO: 544 - RNA, 20 nt, synthetic construct
  source 1..20: mol_type = other RNA
tcgatctatgaaaaagacag

SEQ ID NO: 545 - RNA, 20 nt, synthetic construct
  source 1..20: mol_type = other RNA
tgacggccatcctcggcgtc

SEQ ID NO: 546 - RNA, 20 nt, synthetic construct
  source 1..20: mol_type = other RNA
gacggccatcctcggcgtct

SEQ ID NO: 547 - RNA, 20 nt, synthetic construct
  source 1..20: mol_type = other RNA
acggccatcctcggcgtctg

SEQ ID NO: 548 - RNA, 20 nt, synthetic construct
  source 1..20: mol_type = other RNA
cgcactcacccgcccaggtc

SEQ ID NO: 549 - RNA, 20 nt, synthetic construct
  source 1..20: mol_type = other RNA
gcactcacccgcccaggtct

SEQ ID NO: 550 - RNA, 19 nt, synthetic construct
  source 1..19: mol_type = other RNA
cccaggctcgcactccatg

SEQ ID NO: 551 - RNA, 20 nt, synthetic construct
  source 1..20: mol_type = other RNA
gtcactcaccggcctcgctc

SEQ ID NO: 552 - RNA, 20 nt, synthetic construct
  source 1..20: mol_type = other RNA
ccttaccccatctcagggtg

SEQ ID NO: 553 - RNA, 20 nt, synthetic construct
  source 1..20: mol_type = other RNA
cttaccccatctcagggtga

SEQ ID NO: 554 - RNA, 20 nt, synthetic construct
  source 1..20: mol_type = other RNA
ggctctgggaaaagagggga

SEQ ID NO: 555 - RNA, 20 nt, synthetic construct
  source 1..20: mol_type = other RNA
cttcccacagatagaaaagg

SEQ ID NO: 556 - RNA, 20 nt, synthetic construct
  source 1..20: mol_type = other RNA
ttcccacagatagaaaagga

SEQ ID NO: 557 - RNA, 20 nt, synthetic construct
  source 1..20: mol_type = other RNA
cccaggcagtgacagtgccc

SEQ ID NO: 558 - RNA, 20 nt, synthetic construct
  source 1..20: mol_type = other RNA
ccaggcagtgacagtgccca

SEQ ID NO: 559 - RNA, 20 nt, synthetic construct
  source 1..20: mol_type = other RNA
gacccgcatctcggcgtctg

SEQ ID NO: 560 - RNA, 20 nt, synthetic construct
  source 1..20: mol_type = other RNA
gcactcaccggcccaggtct

SEQ ID NO: 561 - RNA, 20 nt, synthetic construct
  source 1..20: mol_type = other RNA
tgggagcctgggggcgagga

SEQ ID NO: 562 - RNA, 20 nt, synthetic construct
  source 1..20: mol_type = other RNA
gggagcctgggggcgaggag

SEQ ID NO: 563 - RNA, 20 nt, synthetic construct
  source 1..20: mol_type = other RNA
ccccaggctcccactccatg

SEQ ID NO: 564 - RNA, 20 nt, synthetic construct
  source 1..20: mol_type = other RNA
ttaccccatctcagggtgag

SEQ ID NO: 565 - RNA, 20 nt, synthetic construct
  source 1..20: mol_type = other RNA
ttcccacaggtggaaaagga

SEQ ID NO: 566 - RNA, 20 nt, synthetic construct
  source 1..20: mol_type = other RNA
tgacccgcatctcggcgtct

SEQ ID NO: 567 - RNA, 20 nt, synthetic construct
  source 1..20: mol_type = other RNA
gcactcacaggcccaggtct

SEQ ID NO: 568 - RNA, 20 nt, synthetic construct
  source 1..20: mol_type = other RNA
cacaggcccaggtctcggtc

SEQ ID NO: 569 - RNA, 20 nt, synthetic construct
  source 1..20: mol_type = other RNA
agaccctggccccgcccccg

SEQ ID NO: 570 - RNA, 20 nt, synthetic construct
  source 1..20: mol_type = other RNA
ggctctgggaaaggagggga

SEQ ID NO: 571 - RNA, 20 nt, synthetic construct
  source 1..20: mol_type = other RNA
cccagccagcaacagtgccc

SEQ ID NO: 572 - RNA, 22 nt, synthetic construct
  source 1..22: mol_type = other RNA
ggaccgggagacacagaagtac

SEQ ID NO: 573 - RNA, 22 nt, synthetic construct
  source 1..22: mol_type = other RNA
catcgccctgaacgaggacctg

SEQ ID NO: 574 - RNA, 22 nt, synthetic construct
  source 1..22: mol_type = other RNA
catcgccctgaacgaggatctg

SEQ ID NO: 575 - RNA, 22 nt, synthetic construct
  source 1..22: mol_type = other RNA
ttgctggcctggctgtcctagc

SEQ ID NO: 576 - RNA, 22 nt, synthetic construct
  source 1..22: mol_type = other RNA
catcgccctgaacgaggacctg

SEQ ID NO: 577 - RNA, 100 nt, synthetic construct
  source 1..100: mol_type = other RNA
cttaccccacttaactatctgttttagagctagaaatagcaagttaaaataaggctagtccgttatcaacttgaaaaagtggcaccgagtcggtgctttt

SEQ ID NO: 578 - RNA, 100 nt, synthetic construct
  source 1..100: mol_type = other RNA
acagcccaagatagttaagtgttttagagctagaaatagcaagttaaaataaggctagtccgttatcaacttgaaaaagtggcaccgagtcggtgctttt

SEQ ID NO: 579 - RNA, 100 nt, synthetic construct
  source 1..100: mol_type = other RNA
cagcccaagatagttaagtggttttagagctagaaatagcaagttaaaataaggctagtccgttatcaacttgaaaaagtggcaccgagtcggtgctttt

SEQ ID NO: 580 - RNA, 100 nt, synthetic construct
  source 1..100: mol_type = other RNA
cagtaagtcaacttcaatgtgttttagagctagaaatagcaagttaaaataaggctagtccgttatcaacttgaaaaagtggcaccgagtcggtgctttt

SEQ ID NO: 581 - RNA, 100 nt, synthetic construct
  source 1..100: mol_type = other RNA
actcacgctggatagcctccgttttagagctagaaatagcaagttaaaataaggctagtccgttatcaacttgaaaaagtggcaccgagtcggtgctttt

SEQ ID NO: 582 - RNA, 100 nt, synthetic construct
  source 1..100: mol_type = other RNA
aagtcaacttcaatgtcggagttttagagctagaaatagcaagttaaaataaggctagtccgttatcaacttgaaaaagtggcaccgagtcggtgctttt

SEQ ID NO: 583 - RNA, 100 nt, synthetic construct
  source 1..100: mol_type = other RNA
ggatttgcctagcttccccagttttagagctagaaatagcaagttaaaataaggctagtccgttatcaacttgaaaaagtggcaccgagtcggtgctttt

SEQ ID NO: 584 - RNA, 100 nt, synthetic construct
  source 1..100: mol_type = other RNA
tcgatctatgaaaaagacaggttttagagctagaaatagcaagttaaaataaggctagtccgttatcaacttgaaaaagtggcaccgagtcggtgctttt

SEQ ID NO: 585 - RNA, 100 nt, synthetic construct
  source 1..100: mol_type = other RNA
tgacggccatcctcggcgtcgttttagagctagaaatagcaagttaaaataaggctagtccgttatcaacttgaaaaagtggcaccgagtcggtgctttt

SEQ ID NO: 586 - RNA, 100 nt, synthetic construct
  source 1..100: mol_type = other RNA
gacggccatcctcggcgtctgttttagagctagaaatagcaagttaaaataaggctagtccgttatcaacttgaaaaagtggcaccgagtcggtgctttt

SEQ ID NO: 587 - RNA, 100 nt, synthetic construct
  source 1..100: mol_type = other RNA
acggccatcctcggcgtctggttttagagctagaaatagcaagttaaaataaggctagtccgttatcaacttgaaaaagtggcaccgagtcggtgctttt

SEQ ID NO: 588 - RNA, 100 nt, synthetic construct
  source 1..100: mol_type = other RNA
cgcactcacccgcccaggtcgttttagagctagaaatagcaagttaaaataaggctagtccgttatcaacttgaaaaagtggcaccgagtcggtgctttt

SEQ ID NO: 589 - RNA, 100 nt, synthetic construct
  source 1..100: mol_type = other RNA
gcactcacccgcccaggtctgttttagagctagaaatagcaagttaaaataaggctagtccgttatcaacttgaaaaagtggcaccgagtcggtgctttt

SEQ ID NO: 590 - RNA, 99 nt, synthetic construct
  source 1..99: mol_type = other RNA
cccaggctcgcactccatggttttagagctagaaatagcaagttaaaataaggctagtccgttatcaacttgaaaaagtggcaccgagtcggtgctttt

SEQ ID NO: 591 - RNA, 100 nt, synthetic construct
  source 1..100: mol_type = other RNA
gtcactcaccggcctcgctcgttttagagctagaaatagcaagttaaaataaggctagtccgttatcaacttgaaaaagtggcaccgagtcggtgctttt

SEQ ID NO: 592 - RNA, 100 nt, synthetic construct
  source 1..100: mol_type = other RNA
ccttaccccatctcagggtggttttagagctagaaatagcaagttaaaataaggctagtccgttatcaacttgaaaaagtggcaccgagtcggtgctttt

SEQ ID NO: 593 - RNA, 100 nt, synthetic construct
  source 1..100: mol_type = other RNA
cttaccccatctcagggtgagttttagagctagaaatagcaagttaaaataaggctagtccgttatcaacttgaaaaagtggcaccgagtcggtgctttt

SEQ ID NO: 594 - RNA, 100 nt, synthetic construct
  source 1..100: mol_type = other RNA
ggctctgggaaaagaggggagttttagagctagaaatagcaagttaaaataaggctagtccgttatcaacttgaaaaagtggcaccgagtcggtgctttt

SEQ ID NO: 595 - RNA, 100 nt, synthetic construct
  source 1..100: mol_type = other RNA
cttcccacagatagaaaagggttttagagctagaaatagcaagttaaaataaggctagtccgttatcaacttgaaaaagtggcaccgagtcggtgctttt

SEQ ID NO: 596 - RNA, 100 nt, synthetic construct
  source 1..100: mol_type = other RNA
ttcccacagatagaaaaggagttttagagctagaaatagcaagttaaaataaggctagtccgttatcaacttgaaaaagtggcaccgagtcggtgctttt

SEQ ID NO: 597 - RNA, 100 nt, synthetic construct
  source 1..100: mol_type = other RNA
cccaggcagtgacagtgcccgttttagagctagaaatagcaagttaaaataaggctagtccgttatcaacttgaaaaagtggcaccgagtcggtgctttt

SEQ ID NO: 598 - RNA, 100 nt, synthetic construct
  source 1..100: mol_type = other RNA
ccaggcagtgacagtgcccagttttagagctagaaatagcaagttaaaataaggctagtccgttatcaacttgaaaaagtggcaccgagtcggtgctttt

SEQ ID NO: 599 - RNA, 100 nt, synthetic construct
  source 1..100: mol_type = other RNA
gacccgcatctcggcgtctggttttagagctagaaatagcaagttaaaataaggctagtccgttatcaacttgaaaaagtggcaccgagtcggtgctttt

SEQ ID NO: 600 - RNA, 100 nt, synthetic construct
  source 1..100: mol_type = other RNA
gcactcaccggcccaggtctgttttagagctagaaatagcaagttaaaataaggctagtccgttatcaacttgaaaaagtggcaccgagtcggtgctttt

SEQ ID NO: 601 - RNA, 100 nt, synthetic construct
  source 1..100: mol_type = other RNA
tgggagcctgggggcgaggagttttagagctagaaatagcaagttaaaataaggctagtccgttatcaacttgaaaaagtggcaccgagtcggtgctttt

SEQ ID NO: 602 - RNA, 100 nt, synthetic construct
  source 1..100: mol_type = other RNA
gggagcctgggggcgaggaggttttagagctagaaatagcaagttaaaataaggctagtccgttatcaacttgaaaaagtggcaccgagtcggtgctttt

SEQ ID NO: 603 - RNA, 100 nt, synthetic construct
  source 1..100: mol_type = other RNA
ccccaggctcccactccatggttttagagctagaaatagcaagttaaaataaggctagtccgttatcaacttgaaaaagtggcaccgagtcggtgctttt

SEQ ID NO: 604 - RNA, 100 nt, synthetic construct
  source 1..100: mol_type = other RNA
ttaccccatctcagggtgaggttttagagctagaaatagcaagttaaaataaggctagtccgttatcaacttgaaaaagtggcaccgagtcggtgctttt

SEQ ID NO: 605 - RNA, 100 nt, synthetic construct
  source 1..100: mol_type = other RNA
ttcccacaggtggaaaaggagttttagagctagaaatagcaagttaaaataaggctagtccgttatcaacttgaaaaagtggcaccgagtcggtgctttt

SEQ ID NO: 606 - RNA, 100 nt, synthetic construct
  source 1..100: mol_type = other RNA
tgacccgcatctcggcgtctgttttagagctagaaatagcaagttaaaataaggctagtccgttatcaacttgaaaaagtggcaccgagtcggtgctttt

SEQ ID NO: 607 - RNA, 100 nt, synthetic construct
  source 1..100: mol_type = other RNA
gcactcacaggcccaggtctgttttagagctagaaatagcaagttaaaataaggctagtccgttatcaacttgaaaaagtggcaccgagtcggtgctttt

SEQ ID NO: 608 - RNA, 100 nt, synthetic construct
  source 1..100: mol_type = other RNA
cacaggcccaggtctcggtcgttttagagctagaaatagcaagttaaaataaggctagtccgttatcaacttgaaaaagtggcaccgagtcggtgctttt

SEQ ID NO: 609 - RNA, 100 nt, synthetic construct
  source 1..100: mol_type = other RNA
agaccctggccccgcccccggttttagagctagaaatagcaagttaaaataaggctagtccgttatcaacttgaaaaagtggcaccgagtcggtgctttt

SEQ ID NO: 610 - RNA, 100 nt, synthetic construct
  source 1..100: mol_type = other RNA
ggctctgggaaaggaggggagttttagagctagaaatagcaagttaaaataaggctagtccgttatcaacttgaaaaagtggcaccgagtcggtgctttt

SEQ ID NO: 611 - RNA, 100 nt, synthetic construct
  source 1..100: mol_type = other RNA
cccagccagcaacagtgcccgttttagagctagaaatagcaagttaaaataaggctagtccgttatcaacttgaaaaagtggcaccgagtcggtgctttt

SEQ ID NO: 612 - RNA, 119 nt, synthetic construct
  source 1..119: mol_type = other RNA
gttctgtcttttggtcaggacaaccgtctagctataagtgctgcagggtgtgagaaactcctattgctggacgatgtctcttacgaggcattagcacggaccgggagacacagaagtac

SEQ ID NO: 613 - RNA, 119 nt, synthetic construct
  source 1..119: mol_type = other RNA
gttctgtcttttggtcaggacaaccgtctagctataagtgctgcagggtgtgagaaactcctattgctggacgatgtctcttacgaggcattagcaccatcgccctgaacgaggacctg

SEQ ID NO: 614 - RNA, 119 nt, synthetic construct
  source 1..119: mol_type = other RNA
gttctgtcttttggtcaggacaaccgtctagctataagtgctgcagggtgtgagaaactcctattgctggacgatgtctcttacgaggcattagcaccatcgccctgaacgaggatctg

SEQ ID NO: 615 - RNA, 119 nt, synthetic construct
  source 1..119: mol_type = other RNA
gttctgtcttttggtcaggacaaccgtctagctataagtgctgcagggtgtgagaaactcctattgctggacgatgtctcttacgaggcattagcacttgctggcctggctgtcctagc

SEQ ID NO: 616 - RNA, 119 nt, synthetic construct; identical to SEQ ID NO: 613
  source 1..119: mol_type = other RNA

SEQ ID NO: 617 - RNA, 20 nt, synthetic construct
  source 1..20: mol_type = other RNA
cttaccccacttaactatct

SEQ ID NO: 618 - RNA, 21 nt, synthetic construct
  source 1..21: mol_type = other RNA
tccttaccccatctcagggtg

SEQ ID NO: 619 - RNA, 22 nt, synthetic construct
  source 1..22: mol_type = other RNA
ctccttaccccatctcagggtg

SEQ ID NO: 620 - RNA, 19 nt, synthetic construct
  source 1..19: mol_type = other RNA
cttaccccatctcagggtg

SEQ ID NO: 621 - RNA, 18 nt, synthetic construct
  source 1..18: mol_type = other RNA
ttaccccatctcagggtg

SEQ ID NO: 622 - RNA, 21 nt, synthetic construct
  source 1..21: mol_type = other RNA
ccttaccccatctcagggtga

SEQ ID NO: 623 - RNA, 22 nt, synthetic construct
  source 1..22: mol_type = other RNA
tcaccctgagatggggtaagga

SEQ ID NO: 624 - RNA, 19 nt, synthetic construct
  source 1..19: mol_type = other RNA
ttaccccatctcagggtga

SEQ ID NO: 625 - RNA, 18 nt, synthetic construct
  source 1..18: mol_type = other RNA
taccccatctcagggtga

SEQ ID NO: 626 - RNA, 80 nt, synthetic construct; identical to SEQ ID NO: 317
  source 1..80: mol_type = other RNA

SEQ ID NO: 627 - DNA, 1182 bp, synthetic construct
  source 1..1182: mol_type = other DNA
gctccggtgcccgtcagtgggcagagcgcacatcgcccacagtccccgagaagttggggggaggggtcggcaattgaaccggtgcctagagaaggtggcgcggggtaaactgggaaagtgatgtcgtgtactggctccgcctttttcccgagggtgggggagaaccgtatataagtgcagtagtcgccgtgaacgttctttttcgcaacgggtttgccgccagaacacaggtaagtgccgtgtgtggttcccgcgggcctggcctctttacgggttatggcccttgcgtgccttgaattacttccacgcccctggctgcagtacgtgattcttgatcccgagcttcgggttggaagtgggtgggagagttcgaggccttgcgcttaaggagccccttcgcctcgtgcttgagttgaggcctggcctgggcgctggggccgccgcgtgcgaatctggtggcaccttcgcgcctgtctcgctgctttcgataagtctctagccatttaaaatttttgatgacctgctgcgacgctttttttctggcaagatagtcttgtaaatgcgggccaagatctgcacactggtatttcggtttttggggccgcgggcggcgacggggcccgtgcgtcccagcgcacatgttcggcgaggcggggcctgcgagcgcggccaccgagaatcggacgggggtagtctcaagctggccggcctgctctggtgcctggcctcgcgccgccgtgtatcgccccgccctgggcggcaaggctggcccggtcggcaccagttgcgtgagcggaaagatggccgcttcccggccctgctgcagggagctcaaaatggaggacgcggcgctcgggagagcgggcgggtgagtcacccacacaaaggaaaagggcctttccgtcctcagccgtcgcttcatgtgactccacggagtaccgggcgccgtccaggcacctcgattagttctcgagcttttggagtacgtcgtctttaggttggggggaggggttttatgcgatggagtttccccacactgagtgggtggagactgaagttaggccagcttggcacttgatgtaattctccttggaatttgccctttttgagtttggatcttggttcattctcaagcctcagacagtggttcaaagtttttttcttccatttcaggtgtcgtga

SEQ ID NO: 628 - DNA, 388 bp, synthetic construct
  source 1..388: mol_type = other DNA
aatgaaagaccccacctgtaggtttggcaagctaggatcaaggttaggaacagagagacagcagaatatgggccaaacaggatatctgtggtaagcagttcctgccccggctcagggccaagaacagttggaacagcagaatatgggccaaacaggatatctgtggtaagcagttcctgccccggctcagggccaagaacagatggtccccagatgcggtcccgccctcagcagtttctagagaaccatcagatgtttccagggtgccccaaggacctgaaatgaccctgtgccttatttgaactaaccaatcagttcgcttctcgcttctgttcgcgcgcttctgctccccgagctcaataaaagagcccacaacccctcactcggc

SEQ ID NO: 629 - protein, 358 aa, Homo sapiens
MVDGTLLLLLSEALALTQTWAGSHSLKYFHTSVSRPGRGEPRFISVGYVDDTQFVRFDNDAASPRMVPRAPWMEQEGSEYWDRETRSARDTAQIFRVNLRTLRGYYNQSEAGSHTLQWMHGCELGPDGRFLRGYEQFAYDGKDYLTLNEDLRSWTAVDTAAQISEQKSNDASEAEHQRAYLEDTCVEWLHKYLEKGKETLLHLEPPKTHVTHHPISDHEATLRCWALGFYPAEITLTWQQDGEGHTQDTELVETRPAGDGTFQKWAAVVVPSGEEQRYTCHVQHEGLPEPVTLRWKPASQPTIPIVGIIAGLVLLGSVVSGAVVAAVIWRKKSSGGKGGSYSKAEWSDSAQGSESHSL

SEQ ID NO: 630 - DNA, 2548 bp, Homo sapiens
  source 1..2548: mol_type = genomic DNA
ctcaggactcagaggctgggatcatggtagatggaaccctccttttactcctctcggaggccctggcccttacccagacctgggcgggctcccactccttgaagtatttccacacttccgtgtcccggcccggccgcggggagccccgcttcatctctgtgggctacgtggacgacacccagttcgtgcgcttcgacaacgacgccgcgagtccgaggatggtgccgcgggcgccgtggatggagcaggaggggtcagagtattgggaccgggagacacggagcgccagggacaccgcacagattttccgagtgaatctgcggacgctgcgcggctactacaatcagagcgaggccgggtctcacaccctgcagtggatgcatggctgcgagctggggcccgacgggcgcttcctccgcgggtatgaacagttcgcctacgacggcaaggattatctcaccctgaatgaggacctgcgctcctggaccgcggtggacacggcggctcagatctccgagcaaaagtcaaatgatgcctctgaggcggagcaccagagagcctacctggaagacacatgcgtggagtggctccacaaatacctggagaaggggaaggagacgctgcttcacctggagcccccaaagacacacgtgactcaccaccccatctctgaccatgaggccaccctgaggtgctgggccctgggcttctaccctgcggagatcacactgacctggcagcaggatggggagggccatacccaggacacggagctcgtggagaccaggcctgcaggggatggaaccttccagaagtgggcagctgtggtggtgccttctggagaggagcagagatacacgtgccatgtgcagcatgaggggctacccgagcccgtcaccctgagatggaagccggcttcccagcccaccatccccatcgtgggcatcattgctggcctggttctccttggatctgtggtctctggagctgtggttgctgctgtgatatggaggaagaagagctcaggtggaaaaggagggagctactctaaggctgagtggagcgacagtgcccaggggtctgagtctcacagcttgtaaagcctgagacagctgccttgtgtgcgactgagatgcacagctgccttgtgtgcgactgagatgcaggatttcctcacgcctcccctatgtgtcttaggggactctggcttctctttttgcaagggcctctgaatctgtctgtgtccctgttagcacaatgtgaggaggtagagaaacagtccacctctgtgtctaccatgacccccttcctcacactgacctgtgttccttccctgttctcttttctattaaaaataagaacctgggcagagtgcggcagctcatgcctgtaatcccagcacttagggaggccgaggagggcagatcacgaggtcaggagatcgaaaccatcctggctaacacggtgaaaccccgtctctactaaaaaatacaaaaaattagctgggcgcagaggcacgggcctgtagtcccagctactcaggaggcggaggcaggagaatggcgtcaacccgggaggcggaggttgcagtgagccaggattgtgcgactgcactccagcctgggtgacagggtgaaacgccatctcaaaaaataaaaattgaaaaataaaaaaagaacctggatctcaatttaatttttcatattcttgcaatgaaatggacttgaggaagctaagatcatagctagaaatacagataattccacagcacatctctagcaaatttagcctattcctattctctagcctattccttaccacctgtaatcttgaccatataccttggagttgaatattgttttcatactgctgtggtttgaatgttccctccaacactcatgttgagacttaatccctaatgtggcaatactgaaaggtggggcctttgagatgtgattggatcgtaaggctgtgccttcattcatgggttaatggattaatgggttatcacaggaatgggactggtggctttataagaagaggaaaagagaactgagctagcatgcccagcccacagagagcctccactagagtgatgctaagtggaaatgtgaggtgcagctgccacagagggcccccaccagggaaatgtctagtgtctagtggatccaggccacaggagagagtgccttgtggagcgctgggagcaggacctgaccaccaccaggaccccagaactgtggagtcagtggcagcatgcagcgcccccttgggaaagctttaggcaccagcctgcaacccattcgagcagccacgtaggctgcacccagcaaagccacaggcacggggctacctgaggccttgggggcccaatccctgctccagtgtgtccgtgaggcagcacacgaagtcaaaagagattattctcttcccacagataccttttctctcccatgaccctttaacagcatctgcttcattcccctcaccttcccaggctgatctgaggtaaactttgaagtaaaataaaagctgtgtttgagcatca

SEQ ID NO: 631 - protein, 9 aa, Homo sapiens
IIDKSGSTV

SEQ ID NO: 632 - protein, 9 aa, Homo sapiens
VGDKPVSNF

SEQ ID NO: 633 - protein, 9 aa, Homo sapiens
AVDGSGTKF

SEQ ID NO: 634 - protein, 9 aa, Homo sapiens
IVDRGSTNL

SEQ ID NO: 635 - protein, 9 aa, Homo sapiens
YVDEHGTRL

SEQ ID NO: 636 - protein, 9 aa, Homo sapiens
GSDPRVTQL

SEQ ID NO: 637 - protein, 9 aa, Homo sapiens
IVDRPVTLV

SEQ ID NO: 638 - protein, 9 aa, Homo sapiens
IVDKSGRTL

SEQ ID NO: 639 - protein, 9 aa, Homo sapiens
AGDDAPRAV

SEQ ID NO: 640 - protein, 9 aa, Homo sapiens
VSDQANHVL

SEQ ID NO: 641 - protein, 9 aa, Homo sapiens
ASDHAPHTL

SEQ ID NO: 642 - protein, 9 aa, Homo sapiens
VGDPHTVTV

SEQ ID NO: 643 - protein, 9 aa, Homo sapiens
KSDERPVHI

SEQ ID NO: 644 - protein, 9 aa, Homo sapiens
ASDDGTVRI

SEQ ID NO: 645 - protein, 9 aa, Homo sapiens
SIDKTGENF

SEQ ID NO: 646 - protein, 9 aa, Homo sapiens
TSDDVAKEF

SEQ ID NO: 647 - protein, 9 aa, Homo sapiens
SADSKPIDV

SEQ ID NO: 648 - protein, 9 aa, Homo sapiens
KLDETGNSL

SEQ ID NO: 649 - protein, 9 aa, Homo sapiens
MADRGEARL

SEQ ID NO: 650 - protein, 9 aa, Homo sapiens
AADFEIGHF

SEQ ID NO: 651 - protein, 9 aa, Homo sapiens
NADGKIISL

SEQ ID NO: 652 - protein, 9 aa, Homo sapiens
AADGKGVVV

SEQ ID NO: 653 - protein, 9 aa, Homo sapiens
AADKIHSSF

SEQ ID NO: 654 - protein, 9 aa, Homo sapiens
NADAIVVKL

SEQ ID NO: 655 - protein, 9 aa, Homo sapiens
NADTVSSKL

SEQ ID NO: 656 - protein, 9 aa, Homo sapiens
SAEKAPVSV

SEQ ID NO: 657 - protein, 9 aa, Homo sapiens
QGDAVVLKI

SEQ ID NO: 658 - protein, 9 aa, Homo sapiens
AADHYSQQM

SEQ ID NO: 659 - protein, 449 aa, synthetic construct
MSRSVALAVLALLSLSGLEAIQRTPKIQVYSRHPAENGKSNFLNCYVSGFHPSDIEVDLLKNGERIEKVEHSDLSFSKDWSFYLLYYTEFTPTEKDEYACRVNHVTLSQPKIVKWDRDMGGGGSGGGGSGGGGSGGGGSGSHSLKYFHTSVSRPGRGEPRFISVGYVDDTQFVRFDNDAASPRMVPRAPWMEQEGSEYWDRETRSARDTAQIFRVNLRTLRGYYNQSEAGSHTLQWMHGCELGPDGRFLRGYEQFAYDGKDYLTLNEDLRSWTAVDTAAQISEQKSNDASEAEHQRAYLEDTCVEWLHKYLEKGKETLLHLEPPKTHVTHHPISDHEATLRCWALGFYPAEITLTWQQDGEGHTQDTELVETRPAGDGTFQKWAAVVVPSGEEQRYTCHVQHEGLPEPVTLRWKPASQPTIPIMALIVLGGVAGLLLFIGLGIFFCVRC

SEQ ID NO: 660 - protein, 473 aa, synthetic construct
MSRSVALAVLALLSLSGLEAVMAPRTLFLGGGGSGGGGSGGGGSIQRTPKIQVYSRHPAENGKSNFLNCYVSGFHPSDIEVDLLKNGERIEKVEHSDLSFSKDWSFYLLYYTEFTPTEKDEYACRVNHVTLSQPKIVKWDRDMGGGGSGGGGSGGGGSGGGGSGSHSLKYFHTSVSRPGRGEPRFISVGYVDDTQFVRFDNDAASPRMVPRAPWMEQEGSEYWDRETRSARDTAQIFRVNLRTLRGYYNQSEAGSHTLQWMHGCELGPDGRFLRGYEQFAYDGKDYLTLNEDLRSWTAVDTAAQISEQKSNDASEAEHQRAYLEDTCVEWLHKYLEKGKETLLHLEPPKTHVTHHPISDHEATLRCWALGFYPAEITLTWQQDGEGHTQDTELVETRPAGDGTFQKWAAVVVPSGEEQRYTCHVQHEGLPEPVTLRWKPASQPTIPIMALIVLGGVAGLLLFIGLGIFFCVRC

SEQ ID NO: 661 - protein, 623 aa, synthetic construct
MSRSVALAVLALLSLSGLEAKAMHVAQPAVVLASSRGIASFVCEYASPGKATEVRVTVLRQADSQVTEVCAATYMMGNELTFLDDSICTGTSSGNQVNLTIQGLRAMDTGLYICKVELMYPPPYYLGIGNGTQIYVIDPEPCPDSDGGGGSGGGGSGGGGSGGGGSIQRTPKIQVYSRHPAENGKSNFLNCYVSGFHPSDIEVDLLKNGERIEKVEHSDLSFSKDWSFYLLYYTEFTPTEKDEYACRVNHVTLSQPKIVKWDRDMGGGGSGGGGSGGGGSGGGGSGSHSMRYFYTAMSRPGRGEPRFIAVGYVDDTQFVRFDSDAASPRMAPRAPWIEQEGPEYWDGETRNMKASAQTYRENLRIALRYYNQSEAGSHIIQVMYGCDVGPDGRLLRGHDQSAYDGKDYIALNEDLSSWTAADTAAQITQRKWEAARVAEQLRAYLEGLCVEWLRRYLENGKETLQRADPPKTHVTHHPISDHEATLRCWALGFYPAEITLTWQRDGEDQTQDTELVETRPAGDRTFQKWAAVVVPSGEEQRYTCHVQHEGLPKPLTLRWEPSSQSTVPIVGIVAGLAVLAVVVIGAVVAAVMCRRKSSGGKGGSYSQAACSDSAQGSDVSLTA

SEQ ID NO: 662 - protein, 724 aa, synthetic construct
MSRSVALAVLALLSLSGLEAIQRTPKIQVYSRHPAENGKSNFLNCYVSGFHPSDIEVDLLKNGERIEKVEHSDLSFSKDWSFYLLYYTEFTPTEKDEYACRVNHVTLSQPKIVKWDRDMGGGGSGGGGSGGGGSGGGGSGSHSMRYFYTAMSRPGRGEPRFIAVGYVDDTQFVRFDSDAASPRMAPRAPWIEQEGPEYWDGETRNMKASAQTYRENLRIALRYYNQSEAGSHIIQVMYGCDVGPDGRLLRGHDQSAYDGKDYIALNEDLSSWTAADTAAQITQRKWEAARVAEQLRAYLEGLCVEWLRRYLENGKETLQRADPPKTHVTHHPISDHEATLRCWALGFYPAEITLTWQRDGEDQTQDTELVETRPAGDRTFQKWAAVVVPSGEEQRYTCHVQHEGLPKPLTLRWEAAAGGQLLFNKTKSVEFTFCNDTVVIPCFVTNMEAQNTTEVYVKWKFKGRDIYTFDGALNKSTVPTDFSSAKIEVSQLLKGDASLKMDKSDAVSHTGNYTCEVTELTREGETIIELKYRVVSWFSPNENILIVIFPIFAILLFWGQFGIKTLKYRSGGMDEKTIALLVAGLVITVIVIVGAILFVPGEYSLKNATGLGLIVTSTGILILLHYYVFSTAIGLTSFVIAILVIQVIAYILAVVGLSLCIAACIPMHGPLLISGLSILALAQLLGLVYMKFVASNQKTIQPPRKAVEEPLNAFKESKGMMNDE

SEQ ID NO: 663 - protein, 739 aa, synthetic construct
MSRSVALAVLALLSLSGLEAIQRTPKIQVYSRHPAENGKSNFLNCYVSGFHPSDIEVDLLKNGERIEKVEHSDLSFSKDWSFYLLYYTEFTPTEKDEYACRVNHVTLSQPKIVKWDRDMGGGGSGGGGSGGGGSGGGGSGSHSMRYFYTAMSRPGRGEPRFIAVGYVDDTQFVRFDSDAASPRMAPRAPWIEQEGPEYWDGETRNMKASAQTYRENLRIALRYYNQSEAGSHIIQVMYGCDVGPDGRLLRGHDQSAYDGKDYIALNEDLSSWTAADTAAQITQRKWEAARVAEQLRAYLEGLCVEWLRRYLENGKETLQRADPPKTHVTHHPISDHEATLRCWALGFYPAEITLTWQRDGEDQTQDTELVETRPAGDRTFQKWAAVVVPSGEEQRYTCHVQHEGLPKPLTLRWEGGGGSGGGGSGGGGSGGGGSQLLFNKTKSVEFTFCNDTVVIPCFVTNMEAQNTTEVYVKWKFKGRDIYTFDGALNKSTVPTDFSSAKIEVSQLLKGDASLKMDKSDAVSHTGNYTCEVTELTREGETIIELKYRVVSWFSPNENILIVIFPIFAILLFWGQFGIKTLKYRSGGMDEKTIALLVAGLVITVIVIVGAILFVPGEYSLKNATGLGLIVTSTGILILLHYYVFSTAIGLTSFVIAILVIQVIAYILAVVGLSLCIAACIPMHGPLLISGLSILALAQLLGLVYMKFVASNQKTIQPPRKAVEEPLNAFKESKGMMNDE

SEQ ID NO: 664 - protein, 891 aa, synthetic construct
MSRSVALAVLALLSLSGLEAIQRTPKIQVYSRHPAENGKSNFLNCYVSGFHPSDIEVDLLKNGERIEKVEHSDLSFSKDWSFYLLYYTEFTPTEKDEYACRVNHVTLSQPKIVKWDRDMGGGGSGGGGSGGGGSGGGGSGSHSMRYFYTAVSRPGRGEPRFIAVGYVDDTQFVQFDSDAASPRGEPRAPWVEQEGPEYWDRETQKYKRQAQTDRVNLRKLRGYYNQSEAGSHTLQRMYGCDLGPDGRLLRGYNQFAYDGKDYIALNEDLRSWTAADKAAQITQRKWEAAREAEQRRAYLEGTCVEWLRRYLENGKKTLQRAEHPKTHVTHHPVSDHEATLRCWALGFYPAEITLTWQRDGEDQTQDTELVETRPAGDGTFQKWAAVVVPSGEEQRYTCHVQHEGLPEPLTLRWGGGGGSGGGGSGGGGSGGGGSIQRTPKIQVYSRHPAENGKSNFLNCYVSGFHPSDIEVDLLKNGERIEKVEHSDLSFSKDWSFYLLYYTEFTPTEKDEYACRVNHVTLSQPKIVKWDRDMGGGGSGGGGSGGGGSGGGGSGSHSMRYFYTAMSRPGRGEPRFIAVGYVDDTQFVRFDSDAASPRMAPRAPWIEQEGPEYWDGETRNMKASAQTYRENLRIALRYYNQSEAGSHIIQVMYGCDVGPDGRLLRGHDQSAYDGKDYIALNEDLSSWTAADTAAQITQRKWEAARVAEQLRAYLEGLCVEWLRRYLENGKETLQRADPPKTHVTHHPISDHEATLRCWALGFYPAEITLTWQRDGEDQTQDTELVETRPAGDRTFQKWAAVVVPSGEEQRYTCHVQHEGLPKPLTLRWEPSSQSTVPIVGIVAGLAVLAVVVIGAVVAAVMCRRKSSGGKGGSYSQAACSDSAQGSDVSLTA

SEQ ID NO: 665 - protein, 915 aa, synthetic construct
MSRSVALAVLALLSLSGLEAVMAPRTLFLGGGGSGGGGSGGGGSIQRTPKIQVYSRHPAENGKSNFLNCYVSGFHPSDIEVDLLKNGERIEKVEHSDLSFSKDWSFYLLYYTEFTPTEKDEYACRVNHVTLSQPKIVKWDRDMGGGGSGGGGSGGGGSGGGGSGSHSLKYFHTSVSRPGRGEPRFISVGYVDDTQFVRFDNDAASPRMVPRAPWMEQEGSEYWDRETRSARDTAQIFRVNLRTLRGYYNQSEAGSHTLQWMHGCELGPDGRFLRGYEQFAYDGKDYLTLNEDLRSWTAVDTAAQISEQKSNDASEAEHQRAYLEDTCVEWLHKYLEKGKETLLHLEPPKTHVTHHPISDHEATLRCWALGFYPAEITLTWQQDGEGHTQDTELVETRPAGDGTFQKWAAVVVPSGEEQRYTCHVQHEGLPEPVTLRWKGGGGSGGGGSGGGGSGGGGSIQRTPKIQVYSRHPAENGKSNFLNCYVSGFHPSDIEVDLLKNGERIEKVEHSDLSFSKDWSFYLLYYTEFTPTEKDEYACRVNHVTLSQPKIVKWDRDMGGGGSGGGGSGGGGSGGGGSGSHSMRYFYTAMSRPGRGEPRFIAVGYVDDTQFVRFDSDAASPRMAPRAPWIEQEGPEYWDGETRNMKASAQTYRENLRIALRYYNQSEAGSHIIQVMYGCDVGPDGRLLRGHDQSAYDGKDYIALNEDLSSWTAADTAAQITQRKWEAARVAEQLRAYLEGLCVEWLRRYLENGKETLQRADPPKTHVTHHPISDHEATLRCWALGFYPAEITLTWQRDGEDQTQDTELVETRPAGDRTFQKWAAVVVPSGEEQRYTCHVQHEGLPKPLTLRWEPSSQSTVPIVGIVAGLAVLAVVVIGAVVAAVMCRRKSSGGKGGSYSQAACSDSAQGSDVSLTA

SEQ ID NO: 666 - protein, 223 aa, synthetic construct
MACLGFQRHKAQLNLATRTWPCTLLFFLLFIPVFCKAMHVAQPAVVLASSRGIASFVCEYASPGKATEVRVTVLRQADSQVTEVCAATYMMGNELTFLDDSICTGTSSGNQVNLTIQGLRAMDTGLYICKVELMYPPPYYLGIGNGTQIYVIDPEPCPDSDFLLWILAAVSSGLFFYSFLLTAVSLSKMLKKRSPLTTGVYVKMPPTEPECEKQFQPYFIPIN

SEQ ID NO: 667 - protein, 290 aa, synthetic construct
MRIFAVFIFMTYWHLLNAFTVTVPKDLYVVEYGSNMTIECKFPVEKQLDLAALIVYWEMEDKNIIQFVHGEEDLKVQHSSYRQRARLLKDQLSLGNAALQITDVKLQDAGVYRCMISYGGADYKRITVKVNAPYNKINQRILVVDPVTSEHELTCQAEGYPKAEVIWTSSDHQVLSGKTTTTNSKREEKLFNVTSTLRINTTTNEIFYCTFRRLDPEENHTAELVIPELPLAHPPNERTHLVILGAILLCLGVALTFIFRLRKGRMMDVKKCGIQDTNSKKQSDTHLEET

SEQ ID NO: 668 - protein, 323 aa, synthetic construct
MWPLVAALLLGSACCGSAQLLFNKTKSVEFTFCNDTVVIPCFVTNMEAQNTTEVYVKWKFKGRDIYTFDGALNKSTVPTDFSSAKIEVSQLLKGDASLKMDKSDAVSHTGNYTCEVTELTREGETIIELKYRVVSWFSPNENILIVIFPIFAILLFWGQFGIKTLKYRSGGMDEKTIALLVAGLVITVIVIVGAILFVPGEYSLKNATGLGLIVTSTGILILLHYYVFSTAIGLTSFVIAILVIQVIAYILAVVGLSLCIAACIPMHGPLLISGLSILALAQLLGLVYMKFVASNQKTIQPPRKAVEEPLNAFKESKGMMNDE

SEQ ID NO: 669 - DNA, 88 bp, synthetic construct
  source 1..88: mol_type = other DNA; note = SaCas9 scaffold sequence
gttttagtactctgtaatgaaaattacagaatctactaaaacaaggcaaaatgccgtgtttatctcgtcaacttgttggcgagatttt
